(19) United States
(12) Patent Application Publication
(10) Pub. No.: US 2006/0134189 A1
(43) Pub. Date: Jun. 22, 2006

(54) siRNA silencing of apolipoprotein B

(75) Inventors: Ian MacLachlan, Vancouver (CA); Lloyd B. Jeffs, Delta (CA); Adam Judge, Vancouver (CA); Amy C.H. Lee, Surrey (CA); Lorne R. Palmer, Vancouver (CA); Vandana Sood, Vancouver (CA)

Correspondence Address: TOWNSEND AND TOWNSEND AND CREW, LLP, TWO EMBARCADERO CENTER, EIGHTH FLOOR, SAN FRANCISCO, CA, 94111-3834, US

(73) Assignee: Protiva Biotherapeutics, Inc, Burnaby (CA)

(21) Appl. No.: 11/283,550

(22) Filed: Nov. 17, 2005

Related U.S. Application Data
(60) Provisional application No. 60/703,226, filed on Jul. 27, 2005.
(60) Provisional application No. 60/629,808, filed on Nov. 17, 2004.

(51) Int. Cl. A61K 48/00; A61K 9/127; C12N 15/88; C07H 21/02

(52) U.S. Cl. 424/450; 435/458; 514/44; 536/23.1

(57) ABSTRACT

The present invention provides nucleic acid-lipid particles comprising siRNA molecules that silence ApoB expression and methods of using such nucleic acid-lipid particles to silence ApoB expression.

### CROSS-REFERENCES TO RELATED APPLICATIONS

[0001] This application claims the benefit of U.S. Provisional Patent Applications Nos. 60/703,226, filed Jul. 27, 2005 and 60/629,808 filed Nov. 17, 2004, the disclosures of each of which are hereby incorporated by reference in their entirety for all purposes.

### BACKGROUND OF THE INVENTION

[0002] Apolipoprotein B (also known as ApoB, apolipoprotein B-100; ApoB-100, apolipoprotein B-48; ApoB-48 and Ag(x) antigen), is a large glycoprotein that serves an indispensable role in the assembly and secretion of lipids and in the transport and receptor-mediated uptake and delivery of distinct classes of lipoproteins. Apolipoprotein B was cloned (Law et al., PNAS USA 82:8340-8344 (1985)) and mapped to chromosome 2p23-2p24 in 1986 (Deeb et al., PNAS USA 83, 419-422 (1986)). ApoB has a variety of functions, from the absorption and processing of dietary lipids to the regulation of circulating lipoprotein levels (Davidson and Shelness, Annu. Rev. Nutr., 20:169-193 (2000)). Two forms of ApoB have been characterized: ApoB-100 and ApoB-48. ApoB-100 is the major protein component of LDL, contains the domain required for interaction of this lipoprotein species with the LDL receptor, and participates in the transport and delivery of endogenous plasma cholesterol (Davidson and Shelness, 2000, supra). ApoB-48 circulates in association with chylomicrons and chylomicron remnants which are cleared the LDL-receptor-related protein (Davidson and Shelness, 2000, supra). ApoB-48 plays a role in the delivery of dietary lipid from the small intestine to the liver.

[0003] Susceptibility to atherosclerosis is highly correlated with the ambient concentration of apolipoprotein B-containing lipoproteins (Davidson and Shelness, 2000, supra). Elevated plasma levels of the ApoB-100-containing lipoprotein Lp(a) are associated with increased risk for atherosclerosis and its manifestations, which may include hypercholesterolemia (Seed et al., N. Engl. J. Med. 322:1494-1499 (1990), myocardial infarction (Sandkamp et al., Clin. Chem. 36:20-23 (1990), and thrombosis (Nowak-Gottl et al., Pediatrics, 99:E11 (1997)).

[0004] Apolipoprotein B knockout mice (bearing disruptions of both ApoB-100 and ApoB-48) have been generated which are protected from developing hypercholesterolemia when fed a high-fat diet (Farese et al., PNAS USA. 92:1774-1778 (1995) and Kim and Young, J. Lipid Res., 39:703-723 (1998)). The incidence of atherosclerosis has been investigated in mice expressing exclusively ApoB-100 or ApoB-48 and susceptibility to atherosclerosis was found to be dependent on total cholesterol levels.

[0005] Methods for modulating serum cholesterol using antibodies that specifically bind to ApoB are set forth in U.S. Pat. Nos. 6,156,315; 6,309,844; and 6,096,516 and WO 99/18986. Small molecules that lower plasma concentrations of apolipoprotein B or apolipoprotein B-containing lipoproteins by stimulating a pathway for apolipoprotein B degradation are set forth in WO 01/30354. However, these compositions must be administered continuously to effectively modulate serum cholesterol (i.e., by modulating ApoB). None of the compositions or methods described can specifically modulate serum cholesterol on a long term basis.

[0006] Thus, there is a need for compositions and methods for specifically modulating apolipoprotein B expression. The present invention addresses these and other needs.

### SUMMARY OF THE INVENTION

[0007] The present invention provides compositions comprising siRNA molecules that target ApoB expression and methods of using such compositions to silence ApoB gene expression. In some embodiments, the compositions can also be used to modulate (i.e., enhance or decrease) an immune response.

[0008] One embodiment of the present invention provides a nucleic acid-lipid particle that targets ApoB expression. The nucleic acid-lipid particle comprises an siRNA molecule that silences Apolipoprotein B (ApoB) expression; a cationic lipid; and a non-cationic lipid. The nucleic acid-lipid particle can further comprise a conjugated lipid that inhibits aggregation of particles. The nucleic acid-lipid particles comprse an siRNA molecule comprising a sequence set forth in Table 1, rows A-F of Table 2, Table 3, and Table 4. In some embodiments, the nucleic acid-lipid particles comprise at least 2, 3, 4, 5, or 6 or more siRNA molecules comprising the sequences set forth in Table 1, rows A-F of Table 2, and Tables 3-7.

[0009] The cationic lipid may be, e.g., N,N-dioleyl-N,N-dimethylammonium chloride (DODAC), N,N-distearyl-N,N-dimethylammonium bromide (DDAB), N-(1-(2,3-dioleoyloxy)propyl)-N,N,N-trimethylammonium chloride (DOTAP), N-(1-(2,3-dioleyloxy)propyl)-N,N,N-trimethylammonium chloride (DOTMA), and N,N-dimethyl-2,3-dioleyloxy)propylamine (DODMA), 1,2-DiLinoleyloxy-N,N-dimethylaminopropane (DLinDMA), and 1,2-Dilinolenyloxy-N,N-dimethylaminopropane (DLendMA), or mixtures thereof. The cationic lipid may comprise from about 2 mol % to about 60 mol %, about 5 % mol % to about 45 mol %, about 5 mol % to about 15 mol %, about 30 mol % to about 50 mol % or about 40 mol % to about 50 mol % of the total lipid present in the particle.

[0010] The non-cationic lipid may be an anionic lipid or a neutral lipid including, but not limited to, dioleoylphosphatidylethanolamine (DOPE), palmitoyloleoylphosphatidylcholine (POPC), egg phosphatidylcholine (EPC), distearoylphosphatidylcholine (DSPC), palmitoyloleyolphosphatidylglycerol (POPG), dipalmitoyl phosphatidyl ethanolamine (DPPE), dimyristoylphosphoethanolamine (DMPE), distearoyl-phosphatidyl-ethanolamine (DSPE), 16-O-monomethyl PE, 16-O-dimethyl PE, 18-1-trans PE, palmitoyloleoylphosphatidylethanolamine (POPE), 1-stearoyl-2-oleoyl-phosphatidyethanolamine (SOPE), 1,2-dielaidoyl-sn-glycero-3-phophoethanolamine (transDOPE), cholesterol, or mixtures thereof. The non-cationic lipid comprises from about 5 mol % to about 90 mol % or about 20 mol % to about 85 mol % of the total lipid present in the particle.

[0011] The conjugated lipid that inhibits aggregation of particles may be a polyethyleneglycol (PEG)-lipid conjugate, a polyamide (ATTA)-lipid conjugate, a cationic-polymer-lipid conjugates (CPLs), or mixtures thereof. In one preferred embodiment, the nucleic acid-lipid particules comprise either a PEG-lipid conjugate or an ATTA-lipid conjugate together with a CPL. The conjugated lipid that inhibits aggregation of particles may comprise a polyethyleneglycol-lipid including, e.g., a PEG-diacylglycerol (DAG), a PEG dialkyloxypropyl (DAA), a PEG-phospholipid, a PEG-ceramide (Cer), or mixtures thereof. The PEG-DAA conjugate may be PEG-dilauryloxypropyl (C12), a PEG-dimyristyloxypropyl (C14), a PEG-dipalmityloxypropyl (C16), and a PEG-distearyloxypropyl (C18). In some embodiments, the conjugated lipid that inhibits aggregation of particles has the formula: A-W-Y, wherein: A is a lipid moiety; W is a hydrophilic polymer; and Y is a polycationic moiety. W may be a polymer selected from the group consisting of polyethyleneglycol (PEG), polyamide, polylactic acid, polyglycolic acid, polylactic acid/polyglycolic acid copolymers or combinations thereof, said polymer having a molecular weight of about 250 to about 7000 daltons. In some embodiments, Y has at least 4 positive charges at a selected pH. In some embodiments, Y may be lysine, arginine, asparagine, glutamine, derivatives thereof and combinations thereof. The conjugated lipid that prevents aggregation of particles may comprise from about 0 mol % to about 20 mol %, about 0.5 mol % to about 20 mol %, about 1 mol % to about 15 mol %, about 4 mol % to about 10 mol %, or about about 2 mol % of the total lipid present in said particle.

[0012] In some embodiments, the nucleic acid-lipid particle further comprises cholesterol at, e.g., about 0 mol % to about 10 mol %, about 2 mol % to about 10 mol %, about 10 mol % to about 60 mol % or about 20 mol % to about 45 mol % of the total lipid present in said particle.

[0013] In some embodiments, the siRNA in the nucleic acid-lipid particle is not substantially degraded after exposure of the particle to a nuclease at 37° C. for at least 20, 30, 45, or 60 minutes; or after incubation of the particle in serum at 37° C. for at least 30, 45, or 60 minutes.

[0014] In some embodiments, the siRNA is fully encapsulated in the nucleic acid-lipid particle. In some embodiments, the siRNA is complexed to the lipid portion of the particle.

[0015] The present invention further provides pharmaceutical compositions comprising the nucleic acid-lipid particles described herein and a pharmaceutically acceptable carrier.

[0016] The nucleic acid-lipid particles of the present invention are useful for the therapeutic delivery of nucleic acids comprising an interfering RNA sequence (i.e., an siRNA sequence that targets ApoB expression). In particular, it is an object of this invention to provide in vitro and in vivo methods for treatment of a disease in a mammal by downregulating or silencing the transcription and translation of a target nucleic acid sequence of interest. In these methods, an interfering RNA is formulated into a nucleic acid-lipid particle, and the particles are administered to patients requiring such treatment. Alternatively, cells are removed from a patient, the interfering RNA delivered in vitro, and reinjected into the patient. In one embodiment, the present invention provides for a method of introducing a nucleic acid into a cell by contacting a cell with a nucleic acid-lipid particle comprised of a cationic lipid, a non-cationic lipid, and an interfering RNA. The nucleic acid-lipid particle may further comprise a conjugated lipid that inhibits aggregation of the particles.

[0017] In one embodiment, at least 1%, 2%, 4%, 6%, 8%, or 10% of the total injected dose of the nucleic acid-lipid particles is present in plasma about 1, 2, 4, 6, 8, 12, 16, 18, or 24 hours after injection. In other embodiments, more than about 20%, 30%, 40% and as much as 60%, 70% or 80% of the total injected dose of the nucleic acid-lipid particles is present in plasma about 1, 4, 6, 8, 10, 12, 20, or 24 hours after injection. In one embodiment, the effect of an interfering RNA (e.g., downregulation of the target sequence) at a site proximal or distal to the site of administration is detectable at about 12, 24, 48, 72, or 96 hours, or about 6, 8, 10, 12, 14, 16, 18, 19, 20, 22, 24, 26, or 28 days after administration of the nucleic acid-lipid particles. In one embodiment, downregulation of expression of the target sequence is detectable at about 12, 24, 48, 72, or 96 hours, or about 6, 8, 10, 12, 14, 16, 18, 19, 20, 22, 24, 26, or 28 days after administration. In some embodiments, downregulation of expression of an ApoB sequence is detected by measuring ApoB mRNA levels in a biological sample from the mammal. In some embodiments, downregulation of expression of an ApoB sequence is detected by measuring ApoB protein levels in a biological sample from the mammal. In some embodiments, downregulation of expression of an ApoB sequence is measured by measuring cholesterol levels in a biological sample from the mammal.

[0018] The particles are suitable for use in intravenous nucleic acid transfer as they are stable in circulation, of a size required for pharmacodynamic behavior resulting in access to extravascular sites and target cell populations. The particles are also suitable for subcutaneous and intraperitoneal administration. The invention also provides for pharmaceutically acceptable compositions comprising a nucleic acid-lipid particle.

[0019] Another embodiment of the present invention provides methods for in vivo delivery of interfering RNA (e.g., an siRNA that silences expression of Apolipoprotein B). A nucleic acid-lipid particle comprising a cationic lipid, a non-cationic lipid, an interfering RNA, and optionally a conjugated lipid that inhibits aggregation of particles, and is administered (e.g., intravenously, intraperitoneally, intramuscularly, or subcutaneously) to a subject (e.g., a mammal such as a human or a rodent).

[0020] A further embodiment of the present invention provides a method of treating a disease or disorder in a mammalian subject. A therapeutically effective amount of a nucleic acid-lipid particle comprising a cationic lipid, a non-cationic lipid, a conjugated lipid that inhibits aggregation of particles, and interfering RNA (e.g., an siRNA that silences expression of Apolipoprotein B) is administered to the mammalian subject (e.g., a rodent such as a mouse, a primate such as a human or a monkey). In some embodiments, the disease or disorder is a in which ApoB is expressed or overexpressed and expression of ApoB is silenced by the siRNA. In some embodiments, the disease or disorder is atherosclerosis, angina pectoris, high blood pressure, diabetes, or hypothyroidism. In some embodiments, the disease or disorder involves hypercholesterolemia (e.g., atherosclerosis, angina pectoris, or high blood pressure) and serum cholesterol levels are lowered when expression of ApoB is silenced by said siRNA.

[0021] One embodiment of the invention provides a modified siRNA that is capable of silencing expression of a target sequence (i.e., an ApoB sequence), comprising a double-stranded region of about 15 to about 30 nucleotides in length and a non-immunostimulatory mismatch motif consisting of a 5′-XX′-3′ dinucleotide corresponding to a 5′-GU-3′ dinucleotide in an unmodified siRNA sequence that is capable of silencing expression of the target sequence, wherein X and X′ are independently selected from the group consisting of A, U, C, and G, with the proviso that if X is G, X′ is not U and if X′ is U, X is not G. The modified siRNA is less immunogenic than an siRNA that does not comprise the non-immunostimulatory mismatch motif. In some embodiments, the siRNA comprises one, two, three, or more additional immunostimulatory mismatch motifs relative to the target sequence. The immunostimulatory mismatch motifs may be adjacent to each other or, alternatively, they may be separated by 1, 2, 4, 6, 8, 10, or 12 or more nucleotides.

[0022] Another embodiment of the invention provides a modified siRNA that is capable of silencing expression of a target sequence (i.e., an ApoB sequence) comprising a double stranded sequence of about 15 to about 30 nucleotides in length and an immunostimulatory mismatch motif consisting of a 5′-GU-3′ dinucleotide corresponding to a 5′-XX′-3′ dinucleotide motif in an unmodified siRNA that is capable of silencing expression of a target sequence, wherein X and X′ are independently selected from the group consisting of A, U, C, and G, with the proviso that if X is G, X′ is not U and if X′ is U, X is not G. The modified siRNA is more immunogenic than an siRNA that does not comprise the immunostimulatory mismatch motif. In some embodiments, the siRNA comprises one, two, three, or more additional immunostimulatory mismatch motifs relative to the target sequence. The immunostimulatory mismatch motifs may be adjacent to each other or, alternatively, they may be separated by 1, 2, 4, 6, 8, 10, or 12 or more nucleotides.

[0023] In some embodiments, the siRNA described herein are used in methods of silencing expression of a target sequence and/or in methods of modulating (i.e., enhancing or reducing) immune responses associated with the siRNA. An effective amount of the siRNA is administered to a mammalian subject, thereby silencing expression of a target sequence (i.e., an ApoB sequence) or modulating an immune response associated with the siRNA.

[0024] The invention also provides pharmaceutical compositions comprising the siRNA molecules (i.e., the siRNA sequences that target APoB) described herein.

[0025] Yet another embodiment of the invention provides a method of identifying and modifying an siRNA having immunostimulatory properties. The method comprises (a) contacting an unmodified siRNA sequence with a mammalian responder cell under conditions suitable for the responder cell to produce a detectable immune response; (b) identifying the unmodified siRNA sequence as an immunostimulatory siRNA by the presence of a detectable immune response in the responder cell; and (c) modifying the immunostimulatory siRNA by substituting at least one nucleotide with a modified nucleotide, thereby generating a modified siRNA sequence that is less immunostimulatory than the unmodified siRNA sequence.

[0026] In some embodiments, the modified siRNA comprises the modified siRNA contains at least one 2′-O-methyl (2′OMe) purine or pyrimidine nucleotide such as a 2′OMe-guanosine, 2′OMe-uridine, 2′OMe-adenosine nucleotide, and/or 2′OMe-cytosine nucleotide. In certain instances, the unmodified siRNA sequence comprises a 5′-GU-3′ motif and at least one nucleotide in the 5′-GU-3′ motif is substituted with a modified nucleotide. In one embodiment, the mammalian responder cell is a peripheral blood mononuclear cell (PBMC). In another embodiment, the detectable immune response comprises production of a cytokine or growth factor such as, for example, TNF-α, TNF-β, IFN-α, IFN-γ, IL-6, IL-12, or a combination thereof.

[0027] In another embodiment, the present invention provides isolated nucleic acid molecules comprising an siRNA sequence set forth in Table 1, rows A-F of Table 2, and Tables 3-7. The siRNA sequence can be modified or unmodified and can further include its complementary strand, thereby generating an siRNA duplex.

[0028] Other features, objects, and advantages of the invention and its preferred embodiments will become apparent from the detailed description, examples, and claims that follow.

### BRIEF DESCRIPTION OF THE DRAWINGS

[0029] FIG. 1 illustrates data showing plasma IFN-α levels six hours following administration of SNALP encapsulating siRNA targeting ApoB.

[0030] FIG. 2 illustrates data showing IFN-α levels produced by human PBMC 24 hours following contacting the PBMC with SNALP encapsulating siRNA targeting ApoB.

[0031] FIG. 3 illustrates data showing in vitro silencing of ApoB in AML12 cells 40 hours after transfection with SNALP encapsulating siRNA targeting ApoB.

[0032] FIG. 4 illustrates data showing in vivo silencing of ApoB in mice 48 hours following three once daily treatments of siRNA targeting ApoB (2.5 mg/kg).

[0033] FIG. 5 illustrates data showing ApoB silencing from multiple-dose IV administration of SNALP. Values describe measured ApoB:GAPDH mRNA ratios as a percentage of the ratio found in control PBS-treated liver. “Mismatch” is a shortform name of the siRNA apob-1-mismatch. Indicated dosages refer to siRNA amount per body weight. Indicated time points refer to time after the third and last daily SNALP injection. Each column represents the mean of 5 animals and error bars denote the standard error of the mean (SEM).

[0034] FIG. 6 illustrates data showing an extended time course of ApoB silencing from multiple-dose IV administration of SNALP. Values describe measured plasma ApoB protein as a percentage of the concentration found in control PBS-treated blood. “Mismatch” is a shortform name of the siRNA apob-1-mismatch. Arrows indicate the three consecutive days of SNALP injection at a dosage of 5 mg siRNA per kg body eight. Each data point represents the mean of 5 animals and error bars denote SEM

[0035] FIG. 7 illustrates data showing ApoB silencing from multiple-dose IV administration of SNALP prepared via a Stepwise Dilution process. Values describe measured ApoB:GAPDH mRNA ratios as a percentage of the ratio found in control PBS-treated liver. Samples were collected 2 days after administration the third and last daily administration of SNALP at 5 mg siRNA per kg body weight. Each column represents the mean of 5 animals and error bars denote the standard error of the mean (SEM).

[0036] FIG. 8 illustrates data showing ApoB silencing from multiple-dose IV administration of SNALP containing different cationic lipids. Values describe measured ApoB:GAPDH mRNA ratios as a percentage of the ratio found in control PBS-treated liver. “Mismatch” is a shortform name of the siRNA apob-1-mismatch. Samples were collected 2 days after administration the third and last daily administration of SNALP at 5 mg siRNA per kg body weight. Each column represents the mean of 5 animals and error bars denote the standard error of the mean (SEM).

[0037] FIG. 9 illustrates data showing ApoB silencing from multiple-dose IV administration of SNALP containing different phospholipids. Values describe measured ApoB:GAPDH mRNA ratios as a percentage of the ratio found in control PBS-treated liver. “Mismatch” is a shortform name of the siRNA apob-1-mismatch. Samples were collected 1 day after administration the third and last daily administration of SNALP at 3.5 mg siRNA per kg body weight. Each column represents the mean of 4 (for apob-1 SNALP, PBS) or 3 (for mismatch SNALP) animals and error bars denote the standard error of the mean (SEM).

[0038] FIG. 10 illustrates data showing a time course of ApoB silencing from single-dose IV administration of SNALP. Values describe measured plasma ApoB protein as a percentage of the concentration found in control PBS-treated blood. “Mismatch” is a shortform name of the siRNA apob-1-mismatch. On Study Day 0, animals were administered one SNALP injection at a dosage of 5 mg siRNA per kg body weight. Each data point represents the mean of 4 animals and error bars denote SEM.

[0039] FIG. 11 illustrates data showing a time course of ApoB silencing from single-dose IV administration of SNALP. Values describe measured plasma ApoB protein as a percentage of the concentration found in control PBS-treated blood. “Mismatch” is a shortform name of the siRNA apob-1-mismatch. On Study Day 0, animals were administered one SNALP injection at a dosage of 5 mg siRNA per kg body weight. Each data point represents the mean of 4 animals and error bars denote SEM.

[0040] FIG. 12 illustrates data showing the efficacy of anti-ApoB SNALP treatment in a hypercholesterolemia model. Total cholesterol concentration in female C57BL/6 mice was monitored in blood collected via tail nick. The red arrow indicates the day of IV SNALP administration at a dosage of 5 mg siRNA per kg body weight. Each data point between Day 0 and 32 (inclusive) represents the mean of 4 animals. Each data point from Day 35 onwards represents the mean of 2 animals. Error bars denote the standard error of the mean (SEM).

[0041] FIG. 13 illustrates data showing ApoB silencing from single-dose IV administration of SNALP. Values describe measured ApoB:GAPDH mRNA ratios as a percentage of the ratio found in control PBS-treated liver. “Mismatch” is a shortform name of the siRNA apob-1-mismatch. Samples were collected four days after administration of SNALP at 2 mg siRNA per kg body weight. Each column represents the mean of 4 animals (except n=3 for mismatch) and error bars denote the standard error of the mean (SEM).

[0042] FIG. 14 depicts data demonstrating in vivo silencing of ApoB expression following multi-dose intraperitoneal administration of SNALP encapsulating ApoB siRNA. ‘Liver mRNA’ values describe measured ApoB:GAPDH mRNA ratios as a percentage of the ratio found in control PBS-treated liver. ‘Plasma protein’ values describe ApoB protein as a percentage of the concentration found in control PBS-treated plasma. SNALP were administered to animals at 2 mg siRNA per kg body weight per injection, with injections on three consecutive days. Samples were collected 48 hours after the last administration of SNALP. Each column represents the mean of 4 animals (except 3 animals for mismatch SNALP) and error bars denote the standard error of the mean (SEM).

[0043] FIG. 15 depicts data demonstrating in vivo silencing of ApoB gene expression following single-dose subcutaneous administration of SNALP encapsulating ApoB siRNA. Values describe measured ApoB:GAPDH mRNA ratios as a percentage of the ratio found in control PBS-treated liver. “mismatch” is a shortform name of the siRNA apob-1-mismatch. Samples were collected 48 hours after administration of SNALP at 1, 3 or 10 mg siRNA per kg body weight. Each column represents the mean of 4 animals and error bars denote the standard deviation (SD) of the mean.

[0044] FIG. 16 depicts data demonstrating in vivo silencing of ApoB gene expression following single-dose IV administration of a panel of SNALP encapsulating ApoB siRNA. Values describe measured ApoB:GAPDH mRNA ratios as a percentage of the ratio found in control PBS-treated liver. Each column represents the mean of 4 animals and error bars denote the standard deviation.

[0045] FIG. 17 depicts data demonstrating in vivo silencing of ApoB gene expression following single-dose IV administration of a panel of SNALP encapsulating ApoB siRNA. Values describe measured apolipoprotein B protein levels in plasma a percentage of the apoB levels found in control PBS-treated plasma. Each column represents the mean of 4 animals and error bars denote the propagated standard deviation.

[0046] FIG. 18 depicts data reflecting plasma interferon-α levels following single-dose IV administration of a panel of SNALP encapsulating ApoB siRNA. Values describe measured interferon-alpha levels in plasma at 6 h after dosing. Each column represents the mean of 4 animals and error bars denote the standard deviation.

[0047] FIG. 19 depicts data data demonstrating in vivo silencing of ApoB gene expression following single-dose IV administration of a panel of SNALP encapsulating ApoB siRNA. Relative ApoB silencing from 100 nM dosage of apoB siRNA. Values describe measured apolipoprotein B protein levels in HepG2 cell supernatants as a percentage of the apob levels found in untreated cell supernatants. Each column represents the mean of 3 replicates normalized to total protein levels in cell lysates, and error bars denote the propagated standard deviation.

[0048] FIG. 20 is Table 5 which sets forth siRNA sequences that target human ApoB and are derived from GenBank Accession No. NM_{—}000384. The potential immunostimulatory activity of each siRNA is indicated.

[0049] FIG. 21 is Table 6 which sets forth siRNA sequences that target murine ApoB and are derived from GenBank Accession No. XM_{—}137955. The potential immunostimulatory activity of each siRNA is indicated.

[0050] FIG. 22 is Table 7 which sets forth additional siRNA sequences that target human ApoB and are derived from GenBank Accession No. NM_{—}000384.

### DETAILED DESCRIPTION OF THE INVENTION

I. Introduction

[0051] The present invention provides nucleic acid-lipid particles that target ApoB expression comprising an an siRNA that silences ApoB expression; a cationic lipid and a non-cationic lipid. In certain instances, the nucleic acid-lipid particle can further comprise a conjugated lipid that inhibits aggregation of particles. The siRNA sequence can be modified or unmodified.

[0052] In certain embodiments, the nucleic acid-lipid particles described herein ar particularly useful for silencing ApoB expression to treat diseases or disorders associated with expression or overexpression of ApoB. Such diseases include, e.g., atherosclerosis, angina pectoris, high blood pressure, diabetes, hypothyroidism, and hypercholesterolemia. For example, administration of nucleic acid-lipid particles comprising the siRNA sequences described herein can be used to lower serum cholesterol levels.

[0053] One embodiment of the present invention is based on the surprising discovery that siRNA molecules have immunostimulatory effects that can be modulated.

[0054] Without being bound to any particular theory, it is postulated that the siRNA molecules' immunostimulatory activity is mediated by Toll-Like Receptor mediated signaling. These findings have significant implications for the clinical development of RNAi as a novel therapeutic approach and in the interpretation of specific gene silencing effects using siRNA. For example, immunostimulatory siRNA can be modified to disrupt a GU-rich (e.g., a 5′-GU-3′, 5′-UGU-3′, 5′-GUGU-3′, or a 5′-UGUGU-3′ motif), thus reducing their immunostimulatory properties while retaining their ability to silence a target gene (i.e., ApoB). The GU-rich motif may be disrupted by substitution of a nucleotide in the motif or by chemically modifying a nucleotide in the motif. Alternatively, the immunostimulatory siRNA can be used to generate controlled, transient cytokine production; activated T cell and NK cell proliferation, tumor-specific CTL responses, non-gene specific tumor regression, and B cell activation (i.e., antibody production). In addition, non-immunostimulatory siRNA can be modified to to comprise a GU-rich motif, thus enhancing their immunostimulatory properties while retaining their ability to silence a target gene (i.e., ApoB).

II. Definitions

[0055] The term “Apolipoprotein B” or “ApoB” refers to is the main apolipoprotein of chylomicrons and low density lipoproteins (LDL). Mutations in ApoB are associated with hypercholesterolemia. ApoB occurs in the plasma in 2 main forms: apoB48 and apoB100 which are synthesized in the intestine and liver, respectively, due to an organ-specific stop codon. ApoB48 contains 2,152 residues compared to 4,535 residues in apoB100. Cloning and characterization of ApoB is described by e.g., Glickman et al., PNAS USA 83:5296-5300 (1986); Chen et al., .J. Biol. Chem. 261: 2918-12921 (1986); and Hospattankar et al., J. Biol. Chem. 261:9102-9104 (1986). ApoB sequences are set forth in, e.g., Genbank Accession Nos. NM_{—}000384 and BC051278. siRNA sequences that target ApoB are set forth in Tables 1-7 and in Soutschek et al., Nature 432:173-178 (2004).

[0056] The term “interfering RNA” or “RNAi” or “interfering RNA sequence” refers to double-stranded RNA (i.e., duplex RNA) that targets (i.e., silences, reduces, or inhibits) expression of a target gene (i.e., by mediating the degradation of mRNAs which are complementary to the sequence of the interfering RNA) when the interfering RNA is in the same cell as the target gene. Interfering RNA thus refers to the double stranded RNA formed by two complementary strands or by a single, self-complementary strand. Interfering RNA typically has substantial or complete identity to the target gene. The sequence of the interfering RNA can correspond to the full length target gene, or a subsequence thereof.

[0057] Interfering RNA includes small-interfering RNA” or “siRNA,” i.e., interfering RNA of about 15-60, 15-50, 15-50, or 15-40 (duplex) nucleotides in length, more typically about, 15-30, 15-25 or 19-25 (duplex) nucleotides in length, and is preferably about 20-24 or about 21-22 or 21-23 (duplex) nucleotides in length (e.g., each complementary sequence of the double stranded siRNA is 15-60, 15-50, 15-50, 15-40, 15-30, 15-25 or 19-25 nucleotides in length, preferably about 20-24 or about 21-22 or 21-23 nucleotides in length, and the double stranded siRNA is about 15-60, 15-50, 15-50, 15-40, 15-30, 15-25 or 19-25 preferably about 20-24 or about 21-22 or 21-23 base pairs in length). siRNA duplexes may comprise 3′ overhangs of about 1 to about 4 nucleotides, preferably of about 2 to about 3 nucleotides and 5′ phosphate termini. In some embodiments, the siRNA lacks a terminal phosphate. Examples of siRNA include, without limitation, a double-stranded polynucleotide molecule assembled from two separate oligonucleotides, wherein one strand is the sense strand and the other is the complementary antisense strand; a double-stranded polynucleotide molecule assembled from a single oligonucleotide, where the sense and antisense regions are linked by a nucleic acid-based or non-nucleic acid-based linker; a double-stranded polynucleotide molecule with a hairpin secondary structure having self-complementary sense and antisense regions; and a circular single-stranded polynucleotide molecule with two or more loop structures and a stem having self-complementary sense and antisense regions, where the circular polynucleotide can be processed in vivo or in vitro to generate an active double-stranded siRNA molecule.

[0058] The siRNA can be chemically synthesized or may be encoded by a plasmid (e.g., transcribed as sequences that automatically fold into duplexes with hairpin loops). siRNA can also be generated by cleavage of longer dsRNA (e.g., dsRNA greater than about 25 nucleotides in length) with the E coli RNase III or Dicer. These enzymes process the dsRNA into biologically active siRNA (see, e.g., Yang et al., PNAS USA 99: 9942-7 (2002); Calegari et al., PNAS USA 99: 14236 (2002); Byrom et al., Ambion TechNotes 10(1): 4-6 (2003); Kawasaki et al., Nucleic Acids Res. 31: 981-7 (2003); Knight and Bass, Science 293: 2269-71 (2001); and Robertson et al., J. Biol. Chem. 243: 82 (1968)). Preferably, dsRNA are at least 50 nucleotides to about 100, 200, 300, 400 or 500 nucleotides in length. A dsRNA may be as long as 1000, 1500, 2000, 5000 nucleotides in length, or longer. The dsRNA can encode for an entire gene transcript or a partial gene transcript.

[0059] “Substantial identity” refers to a sequence-that hybridizes to a reference sequence under stringent conditions, or to a sequence that has a specified percent identity over a specified region of a reference sequence.

[0060] The phrase “stringent hybridization conditions” refers to conditions under which a probe will hybridize to its target subsequence, typically in a complex mixture of nucleic acids, but to no other sequences. Stringent conditions are sequence-dependent and will be different in different circumstances. Longer sequences hybridize specifically at higher temperatures. An extensive guide to the hybridization of nucleic acids is found in Tijssen, Techniques in Biochemistry and Molecular Biology—Hybridization with Nucleic Probes, “Overview of principles of hybridization and the strategy of nucleic acid assays” (1993). Generally, stringent conditions are selected to be about 5-10° C. lower than the the melting point (Tₘ) for the specific sequence at a defined ionic strength pH. The Tₘ is the temperature (under defined ionic strength, pH, and nucleic concentration) at which 50% of the probes complementary to the target hybridize to the target sequence at equilibrium (as the target sequences are present in excess, at Tₘ, 50% of the probes are occupied at equilibrium). Stringent conditions may also be achieved with the addition of destabilizing agents such as formamide. For selective or specific hybridization, a positive signal is at least two times background, preferably 10 times background hybridization.

[0061] Exemplary stringent hybridization conditions can be as following: 50% formamide, 5×SSC, and 1% SDS, incubating at 42° C., or, 5×SSC, 1% SDS, incubating at 65° C., with wash in 0.2×SSC, and 0.1% SDS at 65° C. For PCR, a temperature of about 36° C. is typical for low stringency amplification, although annealing temperatures may vary between about 32° C. and 48° C. depending on primer length. For high stringency PCR amplification, a temperature of about 62° C. is typical, although high stringency annealing temperatures can range from about 50° C. to about 65° C., depending on the primer length and specificity. Typical cycle conditions for both high and low stringency amplifications include a denaturation phase of 90° C.-95° C. for 30 sec-2 min., an annealing phase lasting 30 sec.-2 min., and an extension phase of about 72° C. for 1-2 min. Protocols and guidelines for low and high stringency amplification reactions are provided, e.g., in Innis et al. (1990) PCR Protocols, A Guide to Methods and Applications, Academic Press, Inc. N.Y.).

[0062] Nucleic acids that do not hybridize to each other under stringent conditions are still substantially identical if the polypeptides which they encode are substantially identical. This occurs, for example, when a copy of a nucleic acid is created using the maximum codon degeneracy permitted by the genetic code. In such cases, the nucleic acids typically hybridize under moderately stringent hybridization conditions. Exemplary “moderately stringent hybridization conditions” include a hybridization in a buffer of 40% formamide, 1 M NaCl, 1% SDS at 37° C., and a wash in 1×SSC at 45° C. A positive hybridization is at least twice background. Those of ordinary skill will readily recognize that alternative hybridization and wash conditions can be utilized to provide conditions of similar stringency. Additional guidelines for determining hybridization parameters are provided in numerous reference, e.g., and Current Protocols in Molecular Biology, ed. Ausubel, et al.

[0063] The terms “substantially identical” or “substantial identity,” in the context of two or more nucleic acids, refer to two or more sequences or subsequences that are the same or have a specified percentage of nucleotides that are the same (i.e., at least about 60%, preferably 65%, 70%, 75%, preferably 80%, 85%, 90%, or 95% identity over a specified region), when compared and aligned for maximum correspondence over a comparison window, or designated region as measured using one of the following sequence comparison algorithms or by manual alignment and visual inspection. This definition, when the context indicates, also refers analogously to the complement of a sequence. Preferably, the substantial identity exists over a region that is at least about 5, 10, 15, 20, 25, 30, 35, 40, 45, 50, 75, or 100 nucleotides in length.

[0064] For sequence comparison, typically one sequence acts as a reference sequence, to which test sequences are compared. When using a sequence comparison algorithm, test and reference sequences are entered into a computer, subsequence coordinates are designated, if necessary, and sequence algorithm program parameters are designated. Default program parameters can be used, or alternative parameters can be designated. The sequence comparison algorithm then calculates the percent sequence identities for the test sequences relative to the reference sequence, based on the program parameters.

[0065] A “comparison window”, as used herein, includes reference to a segment of any one of the number of contiguous positions selected from the group consisting of from 20 to 600, usually about 50 to about 200, more usually about 100 to about 150 in which a sequence may be compared to a reference sequence of the same number of contiguous positions after the two sequences are optimally aligned. Methods of alignment of sequences for comparison are well-known in the art. Optimal alignment of sequences for comparison can be conducted, e.g., by the local homology algorithm of Smith & Waterman, Adv. Appl. Math. 2:482 (1981), by the homology alignment algorithm of Needleman & Wunsch, J. Mol. Biol. 48:443 (1970), by the search for similarity method of Pearson & Lipman, PNAS USA 85:2444 (1988), by computerized implementations of these algorithms (GAP, BESTFIT, FASTA, and TFASTA in the Wisconsin Genetics Software Package, Genetics Computer Group, 575 Science Dr., Madison, Wis.), or by manual alignment and visual inspection (see, e.g., Current Protocols in Molecular Biology (Ausubel et al., eds. 1995 supplement)).

[0066] A preferred example of algorithm that is suitable for determining percent sequence identity and sequence similarity are the BLAST and BLAST 2.0 algorithms, which are described in Altschul et al., Nuc. Acids Res. 25:3389-3402 (1977) and Altschul et al., J. Mol. Biol. 215:403-410 (1990), respectively. BLAST and BLAST 2.0 are used, with the parameters described herein, to determine percent sequence identity for the nucleic acids and proteins of the invention. Software for performing BLAST analyses is publicly available through the National Center for Biotechnology Information (http://www.ncbi.nlm.nih.gov/). This algorithm involves first identifying high scoring sequence pairs (HSPs) by identifying short words of length W in the query sequence, which either match or satisfy some positive-valued threshold score T when aligned with a word of the same length in a database sequence. T is referred to as the neighborhood word score threshold (Altschul et al., supra). These initial neighborhood word hits act as seeds for initiating searches to find longer HSPs containing them. The word hits are extended in both directions along each sequence for as far as the cumulative alignment score can be increased. Cumulative scores are calculated using, for nucleotide sequences, the parameters M (reward score for a pair of matching residues; always >0) and N (penalty score for mismatching residues; always <0). For amino acid sequences, a scoring matrix is used to calculate the cumulative score. Extension of the word hits in each direction are halted when: the cumulative alignment score falls off by the quantity X from its maximum achieved value; the cumulative score goes to zero or below, due to the accumulation of one or more negative-scoring residue alignments; or the end of either sequence is reached. The BLAST algorithm parameters W, T, and X determine the sensitivity and speed of the alignment. The BLASTN program (for nucleotide sequences) uses as defaults a wordlength (W) of 11, an expectation (E) or 10, M=5, N=−4 and a comparison of both strands. For amino acid sequences, the BLASTP program uses as defaults a wordlength of 3, and expectation (E) of 10, and the BLOSUM62 scoring matrix (see Henikoff& Henikoff, PNAS USA 89:10915 (1989)) alignments (B) of 50, expectation (E) of 10, M=5, N=−4, and a comparison of both strands.

[0067] The BLAST algorithm also performs a statistical analysis of the similarity between two sequences (see, e.g., Karlin & Altschul, PNAS USA 90:5873-5787 (1993)). One measure of similarity provided by the BLAST algorithm is the smallest sum probability (P(N)), which provides an indication of the probability by which a match between two nucleotide or amino acid sequences would occur by chance. For example, a nucleic acid is considered similar to a reference sequence if the smallest sum probability in a comparison of the test nucleic acid to the reference nucleic acid is less than about 0.2, more preferably less than about 0.01, and most preferably less than about 0.001.

[0068] The phrase “inhibiting expression of a target gene” refers to the ability of a siRNA of the invention to silence, reduce, or inhibit expression of a target gene (e.g., ApoB). To examine the extent of gene silencing, a test sample (e.g., a biological sample from organism of interest expressing the target gene or a sample of cells in culture expressing the target gene) is contacted with an siRNA that silences, reduces, or inhibits expression of the target gene. Expression of the target gene in the test sample is compared to expression of the target gene in a control sample (e.g., a biological sample from organism of interest expressing the target gene or a sample of cells in culture expressing the target gene) that is not contacted with the siRNA. Control samples (i.e., samples expressing the target gene) are assigned a value of 100%. Silencing, inhibition, or reduction of expression of a target gene is achieved when the value of test the test sample relative to the control sample is about 95%, 90%, 85%, 80%, 75%, 70%, 65%, 60%, 55%, 50%, 45%, 40%, 35%, 30%, 25%, 20%, or 10%. Suitable assays include, e.g., examination of protein or mRNA levels using techniques known to those of skill in the art such as dot blots, northern blots, in situ hybridization, ELISA, immunoprecipitation, enzyme function, as well as phenotypic assays known to those of skill in the art.

[0069] An “effective amount” or “therapeutically effective amount” of an siRNA is an amount sufficient to produce the desired effect, e.g., inhibition of expression of a target sequence in comparison to the normal expression level detected in the absence of the siRNA. Inhibition of expression of a target gene or target sequence is achieved when the value obtained with the siRNA relative to the control is about 90%, 80%, 70%, 60%, 50%, 40%, 30%, 25%, 20%, 15%, 10%, 5%, or 0%.

[0070] By “enhance,” enhancement,” or “enhancing” of an immune response by a siRNA is intended to mean a detectable enhancement of an immune response, typically measured by an increase in cytokine production (e.g., IFNγ, IFNα, TNFα, IL-6, or IL-12) by a responder cell in vitro or an increase in cytokine production in the sera of a mammalian subject after administration of the siRNA. The amount of increase is determined relative to the normal level that is detected in the absence of the siRNA or other nucleic acid sequence. A detectable increase can be as small as about 5% or 10%, or as great as about 80%, 90% or 100%. More typically, a detectable increase is about 20%, 30%, 40%, 50%, 60%, or 70%.

[0071] By “decrease” or “decreasing” of an immune response by a siRNA is intended to mean a detectable decrease of an immune response, typically measured by an decrease in cytokine production (e.g., IFNγ, IFNα, TNFα, IL-6, or IL-12) by a responder cell in vitro or an decrease in cytokine production in the sera of a mammalian subject after administration of the siRNA. The amount of decrease is determined relative to the normal level that is detected in the absence of the siRNA or other nucleic acid sequence. A detectable decrease can be as small as about 5% or 10%, or as great as about 80%, 90% or 100%. More typically, a detectable decrease is about 20%, 30%, 40%, 50%, 60%, or 70%.

[0072] As used herein, the term “responder cell” refers to a cell, preferably a mammalian cell that produces a detectable immune response when contacted with an immunostimulatory double stranded RNA. Exemplary responder cells include, e.g., dendritic cells, macrophages, peripheral blood mononuclear cells (“PBMC”), splenocytes, and the like. Detectable immune responses include, e.g., production of cytokines such as IFN-α, IFN-γ, TNF-α, IL-1, IL-2, IL-3, Il-4, IL-5, IL-6, IL-10, IL-12, IL-13, and TGF.

[0073] The term “lipid” refers to a group of organic compounds that include, but are not limited to, esters of fatty acids and are characterized by being insoluble in water, but soluble in many organic solvents. They are usually divided into at least three classes: (1) “simple lipids` which include fats and oils as well as waxes; (2) “compound lipids” which include phospholipids and glycolipids; and (3) “derived lipids” such as steroids.

[0074] “Lipid vesicle” refers to any lipid composition that can be used to deliver a compound including, but not limited to, liposomes, wherein an aqueous volume is encapsulated by an amphipathic lipid bilayer; or wherein the lipids coat an interior comprising a large molecular component, such as a plasmid comprising an interfering RNA sequence, with a reduced aqueous interior; or lipid aggregates or micelles, wherein the encapsulated component is contained within a relatively disordered lipid mixture.

[0075] As used herein, “lipid encapsulated” can refer to a lipid formulation that provides a compound with full encapsulation, partial encapsulation, or both. In some embodiments, the nucleic acid is fully encapsulated in the lipid formulation (e.g., to form an SPLP, pSPLP, SNALP, or other nucleic acid-lipid particle).

[0076] The nucleic acid-lipid particles of the present invention typically have a mean diameter of less than about 150 nm and are substantially nontoxic. In addition, the nucleic acids when present in the nucleic acid-lipid particles of the present invention are resistant in aqueous solution to degradation with a nuclease. Nucleic acid-lipid particles and their method of preparation are disclosed in U.S. Pat. Nos. 5,976,567 and 5,981,501 and PCT Patent Publication No. WO 96/40964.

[0077] Various suitable cationic lipids may be used in the present invention, either alone or in combination with one or more other cationic lipid species or non-cationic lipid species.

[0078] The cationic lipids of Formula I and Formula II described herein typically carry a net positive charge at a selected pH, such as physiological pH. It has been surprisingly found that cationic lipids comprising alkyl chains with multiple sites of unsaturation, e.g., at least two or three sites of unsaturation, are particularly useful for forming lipid-nucleic acid particles with increased membrane fluidity. A number of cationic lipids and related analogs, which are also useful in the present invention, have been described in co-pending U.S. Ser. No. 08/316,399; U.S. Pat. Nos. 5,208,036, 5,264,618, 5,279,833 and 5,283,185, and WO 96/10390.

[0079] The non-cationic lipids used in the present invention can be any of a variety of neutral uncharged, zwitterionic or anionic lipids capable of producing a stable complex. They are preferably neutral, although they can alternatively be positively or negatively charged. Examples of non-cationic lipids useful in the present invention include: phospholipid-related materials, such as lecithin, phosphatidylethanolamine, lysolecithin, lysophosphatidylethanolamine, phosphatidylserine, phosphatidylinositol, sphingomyelin, cephalin, cardiolipin, phosphatidic acid, cerebrosides, dicetylphosphate, distearoylphosphatidylcholine (DSPC), dioleoylphosphatidylcholine (DOPC), dipalmitoylphosphatidylcholine (DPPC), dioleoylphosphatidylglycerol (DOPG), dipalmitoylphosphatidylglycerol (DPPG), dioleoyl-phosphatidylethanolamine (DOPE), palmitoyloleoylphosphatidylcholine (POPC), palmitoyloleoyl-phosphatidylethanolamine (POPE) and dioleoyl-phosphatidylethanolamine 4-(N-maleimidomethyl)-cyclohexane-1-carboxylate (DOPE-mal). Non-cationic lipids or sterols such as cholesterol may be present. Additional nonphosphorous containing lipids are, e.g., stearylamine, dodecylamine, hexadecylamine, acetyl palmitate, glycerolricinoleate, hexadecyl stereate, isopropyl myristate, amphoteric acrylic polymers, triethanolamine-lauryl sulfate, alkyl-aryl sulfate polyethyloxylated fatty acid amides, dioctadecyldimethyl ammonium bromide and the like, diacylphosphatidylcholine, diacylphosphatidylethanolamine, ceramide, sphingomyelin, cephalin, and cerebrosides. Other lipids such as lysophosphatidylcholine and lysophosphatidylethanolamine may be present. Non-cationic lipids also include polyethylene glycol-based polymers such as PEG 2000, PEG 5000 and polyethylene glycol conjugated to phospholipids or to ceramides (referred to as PEG-Cer), as described in co-pending U.S. Ser. No. 08/316,429, incorporated herein by reference.

[0080] In preferred embodiments, the non-cationic lipids are diacylphosphatidylcholine (e.g., distearoylphosphatidylcholine, dioleoylphosphatidylcholine, dipalmitoylphosphatidylcholine and dilinoleoylphosphatidylcholine), diacylphosphatidylethanolamine (e.g., dioleoylphosphatidylethanolamine and palmitoyloleoylphosphatidylethanolamine), ceramide or sphingomyelin. The acyl groups in these lipids are preferably acyl groups derived from fatty acids having C₁₀-C₂₄ carbon chains. More preferably the acyl groups are lauroyl, myristoyl, palmitoyl, stearoyl or oleoyl. In particularly preferred embodiments, the non-cationic lipid can be cholesterol, 1,2-sn-dioleoylphosphatidylethanolamine, or egg sphingomyelin (ESM).

[0081] In addition to cationic and non-cationic lipids, the nucleic acid-lipid particles (e.g., SPLPs and SNALPs of the present invention can further comprise a bilayer stabilizing component (BSC) such as an ATTA-lipid or a PEG-lipid, such as PEG coupled to dialkyloxypropyls (PEG-DAA) (see, U.S. Patent Publication No. 2005017682), PEG coupled to diacylglycerol (PEG-DAG) (see, U.S. Patent Publication No. 2003077829), PEG coupled to phosphatidylethanolamine (PE) (PEG-PE), or PEG conjugated to ceramides, or a mixture thereof (see, U.S. Pat. No. 5,885,613). In one preferred embodiment, the BSC is a conjugated lipid that inhibits aggregation of the nucleic acid-lipid particles. Suitable conjugated lipids include, but are not limited to PEG-lipid conjugates, ATTA-lipid conjugates, cationic-polymer-lipid conjugates (CPLs) or mixtures thereof. In one preferred embodiment, the nucleic acid-lipid particles comprise either a PEG-lipid conjugate or an ATTA-lipid conjugate together with a CPL.

[0082] PEG is a polyethylene glycol, a linear, water-soluble polymer of ethylene PEG repeating units with two terminal hydroxyl groups. PEGs are classified by their molecular weights; for example, PEG 2000 has an average molecular weight of about 2,000 daltons, and PEG 5000 has an average molecular weight of about 5,000 daltons. PEGs are commercially available from Sigma Chemical Co. and other companies and include, for example, the following: monomethoxypolyethylene glycol (MePEG-OH), monomethoxypolyethylene glycol-succinate (MePEG-S), monomethoxypolyethylene glycol-succinimidyl succinate (MePEG-S-NHS), monomethoxypolyethylene glycol-amine (MePEG-NH₂), monomethoxypolyethylene glycol-tresylate (MePEG-TRES), and monomethoxypolyethylene glycol-imidazolyl-carbonyl (MePEG-IM). In addition, monomethoxypolyethyleneglycol-acetic acid (MePEG-CH₂COOH), is particularly useful for preparing the PEG-lipid conjugates including, e.g., PEG-DAA conjugates.

[0083] In some embodiments, the PEG has an average molecular weight of from about 1000 to about 5000 daltons, more preferably, from about 1,000 to about 3,000 daltons and, even more preferably, of about 2,000 daltons. The PEG can be optionally substituted by an alkyl, alkoxy, acyl or aryl group. PEG can be conjugated directly to the lipid or may be linked to the lipid via a linker moiety. Any linker moiety suitable for coupling the PEG to a lipid can be used including, e.g., non-ester containing linker moieties and ester-containing linker moieties.

[0084] As used herein, the term “non-ester containing linker moiety” refers to a linker moiety that does not contain a carboxylic ester bond (—OC(O)—). Suitable non-ester containing linker moieties include, but are not limited to, amido (—C(O)NH—), amino (—NR—), carbonyl (—C(O)—), carbamate (—NHC(O)O—), urea (—NHC(O)NH—), disulphide (—S—S—), ether (—O—), succinyl (—(O)CCH₂CH₂C(O)—), succinamidyl (—NHC(O)CH₂CH₂C(O)NH—), ether, disulphide, etc. as well as combinations thereof (such as a linker containing both a carbamate linker moiety and an amido linker moiety). In some embodiments, a carbamate linker is used to couple the PEG to the lipid.

[0085] In other embodiments, an ester containing linker moiety is used to couple the PEG to the lipid. Suitable ester containing linker moieties include, e.g., carbonate (—OC(O)O—), succinoyl, phosphate esters (—O—(O)POH—O—), sulfonate esters, and combinations thereof.

[0086] As used herein, the term “SNALP” refers to a stable nucleic acid lipid particle, including SPLP. A SNALP represents a vesicle of lipids coating a reduced aqueous interior comprising a nucleic acid (e.g., ssDNA, dsDNA, ssRNA, dsRNA, siRNA, or a plasmid, including plasmids from which an interfering RNA is transcribed). As used herein, the term “SPLP” refers to a nucleic acid lipid particle comprising a nucleic acid (e.g., a plasmid) encapsulated within a lipid vesicle. SNALPs and SPLPs typically contain a cationic lipid, a non-cationic lipid, and a lipid that prevents aggregation of the particle (e.g., a PEG-lipid conjugate). SNALPs and SPLPs have systemic application as they exhibit extended circulation lifetimes following intravenous (i.v.) injection, accumulate at distal sites (e.g., sites physically separated from the administration site and can mediate expression of the transfected gene at these distal sites. SPLPs include “pSPLP” which comprise an encapsulated condensing agent-nucleic acid complex as set forth in WO 00/03683.

[0087] The term “vesicle-forming lipid” is intended to include any amphipathic lipid having a hydrophobic moiety and a polar head group, and which by itself can form spontaneously into bilayer vesicles in water, as exemplified by most phospholipids.

[0088] The term “vesicle-adopting lipid” is intended to include any amphipathic lipid that is stably incorporated into lipid bilayers in combination with other amphipathic lipids, with its hydrophobic moiety in contact with the interior, hydrophobic region of the bilayer membrane, and its polar head group moiety oriented toward the exterior, polar surface of the membrane. Vesicle-adopting lipids include lipids that on their own tend to adopt a nonlamellar phase, yet which are capable of assuming a bilayer structure in the presence of a bilayer-stabilizing component. A typical example is DOPE (dioleoylphosphatidylethanolamine). Bilayer stabilizing components include, but are not limited to, conjugated lipids that inhibit aggregation of the SNALPs, polyamide oligomers (e.g., ATTA-lipid derivatives), peptides, proteins, detergents, lipid-derivatives, PEG-lipid derivatives such as PEG coupled to dialkyloxypropyls, PEG coupled to diacylglycerols, PEG coupled to phosphatidylethanolamines, and PEG conjugated to ceramides (see, U.S. Pat. No. 5,885,613).

[0089] The term “amphipathic lipid” refers, in part, to any suitable material wherein the hydrophobic portion of the lipid material orients into a hydrophobic phase, while the hydrophilic portion orients toward the aqueous phase. Amphipathic lipids are usually the major component of a lipid vesicle. Hydrophilic characteristics derive from the presence of polar or charged groups such as carbohydrates, phosphate, carboxylic, sulfato, amino, sulfhydryl, nitro, hydroxyl and other like groups. Hydrophobicity can be conferred by the inclusion of apolar groups that include, but are not limited to, long chain saturated and unsaturated aliphatic hydrocarbon groups and such groups substituted by one or more aromatic, cycloaliphatic or heterocyclic group(s). Examples of amphipathic compounds include, but are not limited to, phospholipids, aminolipids and sphingolipids. Representative examples of phospholipids include, but are not limited to, phosphatidylcholine, phosphatidylethanolamine, phosphatidylserine, phosphatidylinositol, phosphatidic acid, palmitoyloleoyl phosphatidylcholine, lysophosphatidylcholine, lysophosphatidylethanolamine, dipalmitoylphosphatidylcholine, dioleoylphosphatidylcholine, distearoylphosphatidylcholine and dilinoleoylphosphatidylcholine. Other compounds lacking in phosphorus, such as sphingolipid, glycosphingolipid families, diacylglycerols and β-acyloxyacids, are also within the group designated as amphipathic lipids. Additionally, the amphipathic lipid described above can be mixed with other lipids including triglycerides and sterols.

[0090] The term “neutral lipid” refers to any of a number of lipid species that exist either in an uncharged or neutral zwitterionic form at a selected pH. At physiological pH, such lipids include, for example, diacylphosphatidylcholine, diacylphosphatidylethanolamine, ceramide, sphingomyelin, cephalin, cholesterol, cerebrosides and diacylglycerols.

[0091] The term “non-cationic lipid” refers to any neutral lipid as described above as well as anionic lipids.

[0092] The term “anionic lipid” refers to any lipid that is negatively charged at physiological pH. These lipids include, but are not limited to, phosphatidylglycerol, cardiolipin, diacylphosphatidylserine, diacylphosphatidic acid, N-dodecanoyl phosphatidylethanolamines, N-succinyl phosphatidylethanolamines, N-glutarylphosphatidylethanolamines, lysylphosphatidylglycerols, palmitoyloleyolphosphatidylglycerol (POPG), and other anionic modifying groups joined to neutral lipids.

[0093] The term “cationic lipid” refers to any of a number of lipid species that carry a net positive charge at a selected pH, such as physiological pH (e.g., pH of about 7.0). As used herein, physiological pH refers to the pH of a biological fluid such as blood or lymph as well as the pH of a cellular compartment such as an endosome, an acidic endosome, or a lysosome). Such lipids include, but are not limited to, N,N-dioleyl-N,N-dimethylammonium chloride (“DODAC”); N-(1-(2,3-dioleyloxy)propyl)-N,N,N-trimethylammonium chloride (“DOTMA”); N,N-dimethyl-(2,3-dioleloxy)propylamine (“DODMA”); N,N-distearyl-N,N-dimethylammonium bromide (“DDAB”); N-(2,3-dioleoyloxy)propyl)-N,N,N-trimethylammonium chloride (“DOTAP”); 3-(N-(N′,N′-dimethylaminoethane)-carbamoyl)cholesterol (“DC-Chol”); N-(1,2-dimyristyloxyprop-3-yl)-N,N-dimethyl-N-hydroxyethyl ammonium bromide (“DMRIE”); 1,2-Dilinoleyloxy-N,N-dimethylaminopropane (DLinDMA); and 1,2-Dilinolenyloxy-N,N-dimethylaminopropane (DLenDMA). The following lipids are cationic and have a positive charge at below physiological pH: DODAP, DODMA, DMDMA and the like.

[0094] The term “hydrophobic lipid” refers to compounds having apolar groups that include, but are not limited to, long chain saturated and unsaturated aliphatic hydrocarbon groups and such groups optionally substituted by one or more aromatic, cycloaliphatic or heterocyclic group(s). Suitable examples include, but are not limited to, diacylglycerol, dialkylglycerol, N-N-dialkylamino, 1,2-diacyloxy-3-aminopropane and 1,2-dialkyl-3-aminopropane.

[0095] The term “fusogenic” refers to the ability of a liposome, an SNALP or other drug delivery system to fuse with membranes of a cell. The membranes can be either the plasma membrane or membranes surrounding organelles, e.g., endosome, nucleus, etc.

[0096] The term “diacylglycerol” refers to a compound having 2-fatty acyl chains, R¹ and R², both of which have independently between 2 and 30 carbons bonded to the 1- and 2-position of glycerol by ester linkages. The acyl groups can be saturated or have varying degrees of unsaturation. Diacylglycerols have the following general formula:

[chemical structure]

[0097] The term “dialkyloxypropyl” refers to a compound having 2-alkyl chains, R¹ and R², both of which have independently between 2 and 30 carbons. The alkyl groups can be saturated or have varying degrees of unsaturation. Dialkyloxypropyls have the following general formula:

[chemical structure]

[0098] The term “ATTA” or “polyamide” refers to, but is not limited to, compounds disclosed in U.S. Pat. Nos. 6,320,017 and 6,586,559, both of which are incorporated herein by reference. These compounds include a compound having the formula [chemical structure]
wherein: R is a member selected from the group consisting of hydrogen, alkyl and acyl; R¹ is a member selected from the group consisting of hydrogen and alkyl; or optionally, R and R¹ and the nitrogen to which they are bound form an azido moiety; R²is a member of the group selected from hydrogen, optionally substituted alkyl, optionally substituted aryl and a side chain of an amino acid; R³ is a member selected from the group consisting of hydrogen, halogen, hydroxy, alkoxy, mercapto, hydrazino, amino and NR⁴R⁵, wherein R⁴ and R⁵ are independently hydrogen or alkyl; n is 4 to 80; m is 2 to 6; p is 1 to 4; and q is 0 or 1. It will be apparent to those of skill in the art that other polyamides can be used in the compounds of the present invention.

[0099] The term “nucleic acid” or “polynucleotide” refers to a polymer containing at least two deoxyribonucleotides or ribonucleotides in either single- or double-stranded form. Unless specifically limited, the terms encompass nucleic acids containing known analogs of natural nucleotides that have similar binding properties as the reference nucleic acid and are metabolized in a manner similar to naturally occurring nucleotides. Examples of such analogs include, without limitation phosphorothioates, phosphoramidates, methyl phosphonates, chiral-methyl phosphonates, 2′)-methyl ribonucleotides, and peptide nucleic acids (PNA's). Unless otherwise indicated, a particular nucleic acid sequence also implicitly encompasses conservatively modified variants thereof (e.g., degenerate codon substitutions), alleles, orthologs, SNPs, and complementary sequences as well as the sequence explicitly indicated. Specifically, degenerate codon substitutions may be achieved by generating sequences in which the third position of one or more selected (or all) codons is substituted with mixed-base and/or deoxyinosine residues (Batzer et al., Nucleic Acid Res. 19:5081 (1991); Ohtsuka et al., J. Biol. Chem. 260:2605-2608 (1985); and Cassol et al. (1992); Rossolini et al., Mol. Cell. Probes 8:91-98 (1994)). “Nucleotides” contain a sugar deoxyribose (DNA) or ribose (RNA), a base, and a phosphate group. Nucleotides are linked together through the phosphate groups. “Bases” include purines and pyrimidines, which further include natural compounds adenine, thymine, guanine, cytosine, uracil, inosine, and natural analogs, and synthetic derivatives of purines and pyrimidines, which include, but are not limited to, modifications which place new reactive groups such as, but not limited to, amines, alcohols, thiols, carboxylates, and alkylhalides. DNA may be in the form of antisense, plasmid DNA, parts of a plasmid DNA, pre-condensed DNA, product of a polymerase chain reaction (PCR), vectors (P1, PAC, BAC, YAC, artificial chromosomes), expression cassettes, chimeric sequences, chromosomal DNA, or derivatives of these groups. The term nucleic acid is used interchangeably with gene, cDNA, mRNA encoded by a gene, and an interfering RNA molecule.

[0100] The term “gene” refers to a nucleic acid (e.g., DNA or RNA) sequence that comprises partial length or entire length coding sequences necessary for the production of a polypeptide or precursor (e.g., ApoB).

[0101] “Gene product,” as used herein, refers to a product of a gene such as an RNA transcript.

[0102] As used herein, the term “aqueous solution” refers to a composition comprising in whole, or in part, water.

[0103] As used herein, the term “organic lipid solution” refers to a composition comprising in whole, or in part, an organic solvent having a lipid.

[0104] “Distal site,” as used herein, refers to a physically separated site, which is not limited to an adjacent capillary bed, but includes sites broadly distributed throughout an organism.

[0105] “Serum-stable” in relation to nucleic acid-lipid particles means that the particle is not significantly degraded after exposure to a serum or nuclease assay that would significantly degrade free DNA. Suitable assays include, for example, a standard serum assay or a DNAse assay such as those described in the Examples below.

[0106] “Systemic delivery,” as used herein, refers to delivery that leads to a broad biodistribution of a compound within an organism. Some techniques of administration can lead to the systemic delivery of certain compounds, but not others. Systemic delivery means that a useful, preferably therapeutic, amount of a compound is exposed to most parts of the body. To obtain broad biodistribution generally requires a blood lifetime such that the compound is not rapidly degraded or cleared (such as by first pass organs (liver, lung, etc.) or by rapid, nonspecific cell binding) before reaching a disease site distal to the site of administration. Systemic delivery of nucleic acid-lipid particules can be by any means known in the art including, for example, intravenous, subcutaneous, intraperitoneal, In some embodiments, systemic delivery of nucleic acid-lipid particles is by intravenous delivery.

[0107] “Local delivery” as used herein refers to delivery of a compound directly to a target site within an organism. For example, a compound can be locally delivered by direct injection into a disease site such as a tumor or other target site such as a site of inflammation or a target organ such as the liver, heart, pancreas, kidney, and the like.

III. siRNAs

[0108] The nucleic acid component of the nucleic acid-lipid particles of the present invention comprises an interfering RNA that silences (e.g., partially or completely inhibits) expression of a gene of interest (i.e., ApoB). An interfering RNA can be provided in several forms. For example, an interfering RNA can be provided as one or more isolated small-interfering RNA (siRNA) duplexes, longer double-stranded RNA (dsRNA), or as siRNA or dsRNA transcribed from a transcriptional cassette in a DNA plasmid. The interfering RNA may also be chemically synthesized. The interfering RNA can be administered alone or co-administered (i.e., concurrently or consecutively) with conventional agents used to treat, e.g., a disease or disorder involving hypercholesterolemia. Such agents include statins such as, e.g., Lipitor®, Mevacor®, Zocor®, Lescol®, Crestor®, and Advicor®).

[0109] In preferred embodiments, the interfering RNA is an siRNA molecule that is capable of silencing expression of a target gene (i.e., ApoB). The siRNA is typically from about 15 to about 30 nucleotides in length. The synthesized or transcribed siRNA can have 3′ overhangs of about 1-4 nucleotides, preferably of about 2-3 nucleotides, and 5′ phosphate termini. In some embodiments, the siRNA lacks terminal phosphates. For example, siRNA targeting the sequences set forth in Tables 1-5 can be used to silence ApoB expression.

[0110] In some embodiments, the siRNA molecules described herein comprise at least one region of mismatch with its target sequence. As used herein, the term “region of mismatch” refers to a region of an siRNA that does not have 100% complementarity to its target sequence. An siRNA may have at least one, two, or three regions of mismatch. The regions of mismatch may be contiguous or may be separated by one or more nucleotides. The regions of mismatch may comprise a single nucleotide or may comprise two, three, four, or more nucleotides.

[0111] A. Selection of siRNA Sequences

[0112] Suitable siRNA sequences that target a gene of interest (i.e., ApoB) can be identified using any means known in the art. Typically, the methods described in Elbashir et al., Nature 411:494-498 (2001) and Elbashir et al., EMBO J 20: 6877-6888 (2001) are combined with rational design rules set forth in Reynolds et al., Nature Biotech. 22:326-330 (2004).

[0113] Typically, the sequence within about 50 to about 100 nucleotide 3′ of the AUG start codon of a transcript from the target gene of interest is scanned for dinucleotide sequences (e.g., AA, CC, GG, or UU) (see, e.g., Elbashir, et al., EMBO J 20: 6877-6888 (2001)). The nucleotides immediately 3′ to the dinucleotide sequences are identified as potential siRNA target sequences. Typically, the 19, 21, 23, 25, 27, 29, 31, 33, 35, or more nucleotides immediately 3′ to the dinucleotide sequences are identified as potential siRNA target sites. In some embodiments, the dinucleotide sequence is an AA sequence and the 19 nucleotides immediately 3′ to the AA dinucleotide are identified as a potential siRNA target site. Typically, siRNA target sites are spaced at different postitions along the length of the target gene. To further enhance silencing efficiency of the siRNA sequences, potential siRNA target sites may be further analyzed to identify sites that do not contain regions of homology to other coding sequences. For example, a suitable siRNA target site of about 21 base pairs typically will not have more than 16-17 contiguous base pairs of homology to other coding sequences. If the siRNA sequences are to be expressed from an RNA Pol III promoter, siRNA target sequences lacking more than 4 contiguous A's or T's are selected.

[0114] Once a potential siRNA sequence has been identified, the sequence can be analyzed using a variety of criteria known in the art. For example, to enhance their silencing efficiency, the siRNA sequences may be analyzed by a rational design algorithm to identify sequences that have one or more of the following features: (1) G/C content of about 25% to about 60% G/C; (2) at least 3 A/Us at positions 15-19 of the sense strand; (3) no internal repeats; (4) an A at position 19 of the sense strand; (5) an A at position 3 of the sense strand; (6) a U at position 10 of the sense strand; (7) no G/C at position 19 of the sense strand; and (8) no G at position 13 of the sense strand. siRNA design tools that incorporate algorithms that assign suitable values of each of these features and are useful for selection of siRNA can be found at, e.g., http://boz094.ust.hk/RNAi/siRNA. One of skill in the art will appreciate that sequences with one or more of the foregoing characteristics may be selected for further analysis and testing as potential siRNA sequences. siRNA sequences complementary to the siRNA target sites may also be designed.

[0115] Additionally, potential siRNA target sequences with one or more of the following criteria can often be eliminated as siRNA: (1) sequences comprising a stretch of 4 or more of the same base in a row; (2) sequences comprising homopolymers of Gs (i.e., to reduce possible non-specific effects due to structural characteristics of these polymers; (3) sequences comprising triple base motifs (e.g., GGG, CCC, AAA, or TTT); (4) sequences comprising stretches of 7 or more G/Cs in a row; and (5) sequence comprising direct repeats of 4 or more bases within the candidates resulting in internal fold-back structures. However, one of skill in the art will appreciate that sequences with one or more of the foregoing characteristics may still be selected for further analysis and testing as potential siRNA sequences.

[0116] Once a potential siRNA sequence has been identified, the sequence can be analyzed for the presence of any immunostimulatory properties, e.g., using an in vitro cytokine assay or an in vivo animal model. Motifs in the sense and/or antisense strand of the siRNA sequence such as GU-rich motifs can also provide an indication of whether the sequence may be immunostimulatory. Once an siRNA molecule is found to be immunostimulatory, it can then be modified to decrease its immunostimulatory properties. As a non-limiting example, an siRNA sequence can be contacted with a mammalian responder cell under conditions such that the cell produces a detectable immune response to determine whether the siRNA is an immunostimulatory or a non-immunostimulatory siRNA. The mammalian responder cell may be from a naïve mammal (i.e., a mammal that has not previously been in contact with the gene product of the siRNA sequence). The mammalian responder cell may be, e.g., a peripheral blood mononuclear cell (PBMC), a macrophage, and the like. The detectable immune response may comprise production of a cytokine or growth factor such as, e.g., TNF-α, TNF-β, IFN-α, IFN-γ, IL-6, IL-12, or a combination thereof. An siRNA molecule identified as being immunostimulatory can then be modified to decrease its immunostimulatory properties by replacing at least one of the nucleotides on the sense and/or antisense strand with modified nucleotides such as 2′OMe nucleotides (e.g., 2′OMe-guanosine, 2′OMe-uridine, 2′OMe-cytosine, and/or 2′OMe-adenosine). The modified siRNA can then be contacted with a mammalian responder cell as described above to confirm that its immunostimulatory properties have been reduced or abrogated.

[0117] Suitable in vitro assays for detecting an immune response include, but are not limited to, the double monoclonal antibody sandwich immunoassay technique of David et al. (U.S. Pat. No. 4,376,110); monoclonal-polyclonal antibody sandwich assays (Wide et al., in Kirkham and Hunter, eds., Radioimmunoassay Methods, E. and S. Livingstone, Edinburgh (1970)); the “Western blot” method of Gordon et al. (U.S. Pat. No. 4,452,901); immunoprecipitation of labeled ligand (Brown et al., J. Biol. Chem. 255:4980-4983 (1980)); enzyme-linked immunosorbent assays (ELISA) as described, for example, by Raines et al., J. Biol. Chem. 257:5154-5160 (1982); immunocytochemical techniques, including the use of fluorochromes (Brooks et al., Clin. Exp. Immunol. 39:477 (1980)); and neutralization of activity (Bowen-Pope et al., Proc. Natl. Acad. Sci. USA 81:2396-2400 (1984)). In addition to the immunoassays described above, a number of other immunoassays are available, including those described in U.S. Pat. Nos. 3,817,827; 3,850,752; 3,901,654; 3,935,074; 3,984,533; 3,996,345; 4,034,074; and 4,098,876.

[0118] A non-limiting example of an in vivo model for detecting an immune response includes an in vivo mouse cytokine induction assay that can be performed as follows: (1) siRNA can be administered by standard intravenous injection in the lateral tail vein; (2) blood can be collected by cardiac puncture about 6 hours after administration and processed as plasma for cytokine analysis; and (3) cytokines can be quantified using sandwich ELISA kits according to the manufacturers' instructions (e.g., mouse and human IFN-α (PBL Biomedical; Piscataway, N.J.); human IL-6 and TNF-α (eBioscience; San Diego, Calif.); and mouse IL-6, TNF-α, and IFN-γ (BD Biosciences; San Diego, Calif.)).

[0119] Monoclonal antibodies that specifically bind cytokines and growth factors are commercially available from multiple sources and can be generated using methods known in the art (see, e.g., Kohler and Milstein, Nature 256: 495-497 (1975) and Harlow and Lane, ANTIBODIES, A LABORATORY MANUAL, Cold Spring Harbor Publication, New York (1999)). Generation of monoclonal antibodies has been previously described and can be accomplished by any means known in the art (Buhring et al. in Hybridoma, Vol. 10, No. 1, pp. 77-78 (1991)). In some methods, the monoclonal antibody is labeled (e.g., with any composition detectable by spectroscopic, photochemical, biochemical, electrical, optical, or chemical means) to facilitate detection.

[0120] B. Generating siRNA

[0121] siRNA can be provided in several forms including, e.g as one or more isolated siRNA duplexes, longer double-stranded RNA (dsRNA) or as siRNA or dsRNA transcribed from a transcriptional cassette in a DNA plasmid. siRNA may also be chemically synthesized. The siRNA sequences may have overhangs (e.g., 3′ or 5′ overhangs as described in Elbashir et al., Genes Dev. 15:188 (2001) or Nykänen et al., Cell 107:309 (2001), or may lack overhangs (i.e., to have blunt ends).

[0122] An RNA population can be used to provide long precursor RNAs, or long precursor RNAs that have substantial or complete identity to a selected target sequence can be used to make the siRNA. The RNAs can be isolated from cells or tissue, synthesized, and/or cloned according to methods well known to those of skill in the art. The RNA can be a mixed population (obtained from cells or tissue, transcribed from cDNA, subtracted, selected etc.), or can represent a single target sequence. RNA can be naturally occurring, (e.g., isolated from tissue or cell samples), synthesized in vitro (e.g., using T7 or SP6 polymerase and PCR products or a cloned cDNA), or chemically synthesized.

[0123] To form a long dsRNA, for synthetic RNAs, the complement is also transcribed in vitro and hybridized to form a dsRNA. If a naturally occuring RNA population is used, the RNA complements are also provided (e.g., to form dsRNA for digestion by E. coli RNAse III or Dicer), e.g., by transcribing cDNAs corresponding to the RNA population, or by using RNA polymerases. The precursor RNAs are then hybridized to form double stranded RNAs for digestion. The dsRNAs can be directly administered to a subject or can be digested in vitro prior to administration.

[0124] Alternatively, one or more DNA plasmids encoding one or more siRNA templates are used to provide siRNA. siRNA can be transcribed as sequences that automatically fold into duplexes with hairpin loops from DNA templates in plasmids having RNA polymerase III transcriptional units, for example, based on the naturally occurring transcription units for small nuclear RNA U6 or human RNase P RNA H1 (see, Brummelkamp, et al., Science 296:550 (2002); Donzé, et al., Nucleic Acids Res. 30:e46 (2002); Paddison, et al., Genes Dev. 16:948 (2002); Yu, et al., PNAS USA 99:6047 (2002); Lee, et al., Nat. Biotech. 20:500 (2002); Miyagishi, et al., Nat. Biotech. 20:497 (2002); Paul, et al., Nat. Biotech. 20:505 (2002); and Sui, et al., PNAS USA 99:5515 (2002)). Typically, a transcriptional unit or cassette will contain an RNA transcript promoter sequence, such as an H1-RNA or a U6 promoter, operably linked to a template for transcription of a desired siRNA sequence and a termination sequence, comprised of 2-3 uridine residues and a polythymidine (T5) sequence (polyadenylation signal) (Brummelkamp, Science, supra). The selected promoter can provide for constitutive or inducible transcription. Compositions and methods for DNA-directed transcription of RNA interference molecules is described in detail in U.S. Pat. No. 6,573,099. The transcriptional unit is incorporated into a plasmid or DNA vector from which the interfering RNA is transcribed. Plasmids suitable for in vivo delivery of genetic material for therapeutic purposes are described in detail in U.S. Pat. Nos. 5,962,428 and 5,910,488. The selected plasmid can provide for transient or stable delivery of a target cell. It will be apparent to those of skill in the art that plasmids originally designed to express desired gene sequences can be modified to contain a transcriptional unit cassette for transcription of siRNA.

[0125] Methods for isolating RNA, synthesizing RNA, hybridizing nucleic acids, making and screening cDNA libraries, and performing PCR are well known in the art (see, e.g., Gubler and Hoffman, Gene 25:263-269 (1983); Sambrook et al., supra; Ausubel et al., supra), as are PCR methods (see U.S. Pat. Nos. 4,683,195 and 4,683,202; PCR Protocols: A Guide to Methods and Applications (Innis et al., eds, 1990)). Expression libraries are also well known to those of skill in the art. Additional basic texts disclosing the general methods of use in this invention include Sambrook et al., Molecular Cloning, A Laboratory Manual (2nd ed. 1989); Kriegler, Gene Transfer and Expression: A Laboratory Manual (1990); and Current Protocols in Molecular Biology (Ausubel et al., eds., 1994)).

[0126] The siRNA component of the SNALP can also be chemically synthesized. The oligonucleotides that comprise the modified siRNA molecule can be synthesized using any of a variety of techniques known in the art, such as those described in Usman et al., J. Am. Chem. Soc. 109:7845 (1987); Scaringe et al., Nuc. Acids Res. 18:5433 (1990); Wincott et al., Nuc. Acids Res. 23:2677-2684 (1995); and Wincott et al., Methods Mol. Bio. 74:59 (1997). The synthesis of oligonucleotides makes use of common nucleic acid protecting and coupling groups, such as dimethoxytrityl at the 5′-end and phosphoramidites at the 3′-end. As a non-limiting example, small scale syntheses can be conducted on an Applied Biosystems synthesizer using a 0.2 μmol scale protocol with a 2.5 min. coupling step for 2′-O-methylated nucleotides. Alternatively, syntheses at the 0.2 μmol scale can be performed on a 96-well plate synthesizer from Protogene (Palo Alto, Calif.). However, a larger or smaller scale of synthesis is also within the scope of the present invention. Suitable reagents for oligonucleotide synthesis, methods for RNA deprotection, and methods for RNA purification are known to those of skill in the art.

[0127] Modified siRNA molecules can also be synthesized via a tandem synthesis technique, wherein both strands are synthesized as a single continuous oligonucleotide fragment or strand separated by a cleavable linker that is subsequently cleaved to provide separate fragments or strands that hybridize to form the siRNA duplex. The linker can be a polynucleotide linker or a non-nucleotide linker. The tandem synthesis of modified siRNA can be readily adapted to both multiwell/multiplate synthesis platforms as well as large scale synthesis platforms employing batch reactors, synthesis columns, and the like. Alternatively, the modified siRNA molecule can be assembled from two distinct oligonucleotides, wherein one oligonucleotide comprises the sense strand and the other comprises the antisense strand of the siRNA. For example, each strand can be synthesized separately and joined together by hybridization or ligation following synthesis and/or deprotection. In certain other instances, the modified siRNA molecule can be synthesized as a single continuous oligonucleotide fragment, wherein the self-complementary sense and antisense regions hybridize to form an siRNA duplex having hairpin secondary structure.

[0128] C. Modifying siRNA Sequences

[0129] The anti-ApoB siRNA molecules described herein can comprise at least one modified nucleotide in the sense and/or antisense strand (see, e.g., U.S. Provisional Patent Application No. 60/711,494). Examples of modified nucleotides suitable for use in the present invention include, but are not limited to, ribonucleotides having a 2′-O-methyl (2′OMe), 2′-deoxy-2′-fluoro, 2′-deoxy, 5-C-methyl, 2′-methoxyethyl, 4′-thio, 2′-amino, or 2′-C-allyl group. Modified nucleotides having a Northern conformation such as those described in, e.g., Saenger, Principles of Nucleic Acid Structure, Springer-Verlag Ed. (1984), are also suitable for use in the siRNA molecules of the present invention. Such modified nucleotides include, without limitation, locked nucleic acid (LNA) nucleotides (e.g., 2′-O, 4′-C-methylene-(D-ribofuranosyl) nucleotides), 2′-methoxyethoxy (MOE) nucleotides, 2′-methyl-thio-ethyl nucleotides, 2′-deoxy-2′-fluoro nucleotides, 2′-deoxy-2′-chloro nucleotides, and 2′-azido nucleotides. In certain instances, the siRNA molecule includes one or more G-clamp nucleotides. A G-clamp nucleotide refers to a modified cytosine analog wherein the modifications confer the ability to hydrogen bond both Watson-Crick and Hoogsteen faces of a complementary guanine nucleotide within a duplex (see, e.g., Lin et al., J. Am. Chem. Soc. 120:8531-8532 (1998)). In addition, nucleotides having a nucleotide base analog such as, for example, C-phenyl, C-naphthyl, other aromatic derivatives, inosine, azole carboxamides, and nitroazole derivatives such as 3-nitropyrrole, 4-nitroindole, 5-nitroindole, and 6-nitroindole (see, e.g., Loakes, Nucl. Acids Res. 29:2437-2447 (2001)) can be incorporated into the siRNA molecule.

[0130] In certain embodiments, the siRNA molecule can further comprise one or more chemical modifications such as terminal cap moieties, phosphate backbone modifications, and the like. Examples of terminal cap moieties include, without limitation, inverted deoxy abasic residues, glyceryl modifications, 4′,5′-methylene nucleotides, 1-(β-D-erythrofuranosyl) nucleotides, 4′-thio nucleotides, carbocyclic nucleotides, 1,5-anhydrohexitol nucleotides, L-nucleotides, α-nucleotides, modified base nucleotides, threo-pentofuranosyl nucleotides, acyclic 3′,4′-seco nucleotides, acyclic 3,4-dihydroxybutyl nucleotides, acyclic 3,5-dihydroxypentyl nucleotides, 3′-3′-inverted nucleotide moieties, 3′-3′-inverted abasic moieties, 3′-2′-inverted nucleotide moieties, 3′-2′-inverted abasic moieties, 5′-5′-inverted nucleotide moieties, 5′-5′-inverted abasic moieties, 3′-5′-inverted deoxy abasic moieties, 5′-amino-alkyl phosphate, 1,3-diamino-2-propyl phosphate, 3-aminopropyl phosphate, 6-aminohexyl phosphate, 1,2-aminododecyl phosphate, hydroxypropyl phosphate, 1,4-butanediol phosphate, 3′-phosphoramidate, 5′-phosphoramidate, hexylphosphate, aminohexyl phosphate, 3′-phosphate, 5′-amino, 3′-phosphorothioate, 5′-phosphorothioate, phosphorodithioate, and bridging or non-bridging methylphosphonate or 5′-mercapto moieties (see, e.g., U.S. Pat. No. 5,998,203; Beaucage et al., Tetrahedron 49:1925 (1993)). Non-limiting examples of phosphate backbone modifications (i.e., resulting in modified internucleotide linkages) include phosphorothioate, phosphorodithioate, methylphosphonate, phosphotriester, morpholino, amidate, carbamate, carboxymethyl, acetamidate, polyamide, sulfonate, sulfonamide, sulfamate, formacetal, thioformacetal, and alkylsilyl substitutions (see, e.g., Hunziker et al., Nucleic Acid Analogues: Synthesis and Properties, in Modern Synthetic Methods, VCH, 331-417 (1995); Mesmaeker et al., Novel Backbone Replacements for Oligonucleotides, in Carbohydrate Modifications in Antisense Research, ACS, 24-39 (1994)). Such chemical modifications can occur at the 5′-end and/or 3′-end of the sense strand, antisense strand, or both strands of the siRNA.

[0131] In some embodiments, the sense and/or antisense strand can further comprise a 3′-terminal overhang having about 1 to about 4 (e.g.,. 1, 2, 3, or 4) 2′-deoxy ribonucleotides and/or any combination of modified and unmodified nucleotides. Additional examples of modified nucleotides and types of chemical modifications that can be introduced into the modified siRNA molecule are described, e.g., in UK Patent No. GB 2,397,818 B.

[0132] The modified siRNA molecules described herein can optionally comprise one or more non-nucleotides in one or both strands of the siRNA. As used herein, the term “non-nucleotide” refers to any group or compound that can be incorporated into a nucleic acid chain in the place of one or more nucleotide units, including sugar and/or phosphate substitutions, and allows the remaining bases to exhibit their activity. The group or compound is abasic in that it does not contain a commonly recognized nucleotide base such as adenosine, guanine, cytosine, uracil, or thymine and therefore lacks a base at the 1′-position.

[0133] In other embodiments, chemical modification of the siRNA comprises attaching a conjugate to the chemically-modified siRNA molecule. The conjugate can be attached at the 5′ and/or 3′-end of the sense and/or antisense strand of the chemically-modified siRNA via a covalent attachment such as, e.g., a biodegradable linker. The conjugate can also be attached to the chemically-modified siRNA, e.g., through a carbamate group or other linking group (see, e.g., U.S. Patent Publication Nos. 20050074771, 20050043219, and 20050158727). In certain instances, the conjugate is a molecule that facilitates the delivery of the chemically-modified siRNA into a cell. Examples of conjugate molecules suitable for attachment to a chemically-modified siRNA include, without limitation, steroids such as cholesterol, glycols such as polyethylene glycol (PEG), human serum albumin (HSA), fatty acids, carotenoids, terpenes, bile acids, folates (e.g., folic acid, folate analogs and derivatives thereof), sugars (e.g., galactose, galactosamine, N-acetyl galactosamine, glucose, mannose, fructose, fucose, etc.), phospholipids, peptides, ligands for cellular receptors capable of mediating cellular uptake, and combinations thereof (see, e.g., U.S. Patent Publication Nos. 20030130186, 20040110296, and 20040249178; U.S. Pat. No. 6,753,423). Other examples include the lipophilic moiety, vitamin, polymer, peptide, protein, nucleic acid, small molecule, oligosaccharide, carbohydrate cluster, intercalator, minor groove binder, cleaving agent, and cross-linking agent conjugate molecules described in U.S. Patent Publication Nos. 20050119470 and 20050107325. Yet other examples include the 2′-O-alkyl amine, 2′-O-alkoxyalkyl amine, polyamine, C5-cationic modified pyrimidine, cationic peptide, guanidinium group, amidininium group, cationic amino acid conjugate molecules described in U.S. Patent Publication No. 20050153337. Additional examples include the hydrophobic group, membrane active compound, cell penetrating compound, cell targeting signal, interaction modifier, and steric stabilizer conjugate molecules described in U.S. Patent Publication No. 20040167090. Further examples include the conjugate molecules described in U.S. Patent Publication No. 20050239739. The type of conjugate used and the extent of conjugation to the chemically-modified siRNA molecule can be evaluated for improved pharmacokinetic profiles, bioavailability, and/or stability of the siRNA. As such, one skilled in the art can screen chemically-modified siRNA molecules having various conjugates attached thereto to identify ones having improved properties using any of a variety of well-known in vitro cell culture or in vivo animal models.

[0134] C. In Vitro Methods Using siRNA

[0135] In addition silencing ApoB gene expression, the siRNA sequences described herein can be used in a variety of in vitro diagnostic and screening methods. For example, the siRNA sequences can be used as probes, e.g., to detect ApoB sequences. The siRNA sequences can also be used in screening assays, including high throughput assays to detect the effects of compounds that modulate lipid metabolism on ApoB expression.

[0136] In one exemplary embodiment, the siRNA sequences can be used in high density oligonucleotide array technology (e.g., GeneChip™) to identify ApoB protein, orthologs, alleles, conservatively modified variants, and polymorphic variants in this invention. In some cases, the siRNA can be used with GeneChip™ as a diagnostic tool in detecting a disease or disorder associated with ApoB expression or overexpression (e.g., hypercholesterolemia) in a biological sample, see, e.g., Gunthand et al., AIDS Res. Hum. Retroviruses 14: 869-876 (1998); Kozal et al., Nat. Med. 2:753-759 (1996); Matson et al., Anal. Biochem. 224:110-106 (1995); Lockhart et al., Nat. Biotechnol. 14:1675-1680 (1996); Gingeras et al., Genome Res. 8:435-448 (1998); Hacia et al., Nucleic Acids Res. 26:3865-3866 (1998).

[0137] In another exemplary embodiment, the siRNA sequences can be used in an in vitro diagnostic assay to determine the effects of a potential modulator of lipid metabolism (i.e., by determining the effects of the potential modulator on ApoB expression). A liver biopsy is taken from a subject undergoing treatment with the lipid metabolism modulator (e.g., a statin such as Lipitor®, Mevacor®, Zocor®, Lescol®, Crestor®, or Advicor®) and the siRNA sequences are used to detect ApoB expression, thereby determining the effect of the modulator on ApoB expression.

[0138] In yet another exemplary embodiment, the siRNA sequences can be inserted into an expression vector and transfected into cells for use in a variety of in vitro diagnostic assays. Typically the expression vector contains a strong promoter to direct transcription and a transcription/translation terminator. Suitable bacterial promoters are well known in the art and described, e.g., in Sambrook et al., and Ausubel et al, supra. Bacterial expression systems for expressing the protein are available in, e.g., E. coli, Bacillus sp., and Salmonella (Palva et al., Gene 22:229-235 (1983); Mosbach et al., Nature 302:543-545 (1983). Kits for such expression systems are commercially available. Eukaryotic expression systems for mammalian cells, yeast, and insect cells are well known in the art and are also commercially available.

[0139] Selection of the promoter used to direct expression of a heterologous nucleic acid depends on the particular application. The promoter is preferably positioned about the same distance from the heterologous transcription start site as it is from the transcription start site in its natural setting. As is known in the art, however, some variation in this distance can be accommodated without loss of promoter function.

[0140] In addition to the promoter, the expression vector typically contains a transcription unit or expression cassette that contains all the additional elements required for the expression of the nucleic acid in host cells. A typical expression cassette thus contains a promoter operably linked to the nucleic acid sequence and signals required for efficient polyadenylation of the transcript, ribosome binding sites, and translation termination. Additional elements of the cassette may include enhancers.

[0141] In addition to a promoter sequence, the expression cassette should also contain a transcription termination region downstream of the structural gene to provide for efficient termination. The termination region may be obtained from the same gene as the promoter sequence or may be obtained from different genes.

[0142] The particular expression vector used to transport the genetic information into the cell is not particularly critical. Any of the conventional vectors used for expression in eukaryotic or prokaryotic cells may be used. Standard bacterial expression vectors include plasmids such as pBR322 based plasmids, pSKF, pET23D, and fusion expression systems such as MBP, GST, and LacZ. Epitope tags can also be added to recombinant proteins to provide convenient methods of isolation, e.g., c-myc.

[0143] Expression vectors containing regulatory elements from eukaryotic viruses are typically used in eukaryotic expression vectors, e.g., SV40 vectors, papilloma virus vectors, retroviral vectors, and vectors derived from Epstein-Barr virus. Other exemplary eukaryotic vectors include pMSG, pAV009/A.sup.+, pMTO10/A.sup.+, pMAMneo-5, baculovirus pDSVE, and any other vector allowing expression of proteins under the direction of the CMV promoter, SV40 early promoter, SV40 later promoter, metallothionein promoter, murine mammary tumor virus promoter, Rous sarcoma virus promoter, polyhedrin promoter, or other promoters shown effective for expression in eukaryotic cells.

[0144] The vector may further comprise a reporter gene. The siRNA sequence is operably linked to a reporter gene such as chloramphenicol acetyltransferase, firefly luciferase, bacterial luciferase, β-galactosidase and alkaline phosphatase. The reporter construct is typically transfected into a cell. After treatment with a potential modulator, the amount of reporter gene transcription, translation, or activity is measured according to standard techniques known to those of skill in the art.

[0145] The elements that are typically included in expression vectors also include a replicon that functions in E. coli, a gene encoding antibiotic resistance to permit selection of bacteria that harbor recombinant plasmids, and unique restriction sites in nonessential regions of the plasmid to allow insertion of eukaryotic sequences. The particular antibiotic resistance gene chosen is not critical, any of the many resistance genes known in the art are suitable. The prokaryotic sequences are preferably chosen such that they do not interfere with the replication of the DNA in eukaryotic cells, if necessary.

[0146] Transformation of eukaryotic and prokaryotic cells are performed according to standard techniques (see, e.g., Morrison, J. Bact. 132:349-351 (1977); Clark-Curtiss & Curtiss, Methods in Enzymology 101:347-362 (Wu et al., eds, 1983). Any of the well-known procedures for introducing foreign nucleotide sequences into host cells may be used. These include the use of calcium phosphate transfection, polybrene, protoplast fusion, electroporation, biolistics, liposomes, microinjection, plasma vectors, viral vectors and any of the other well known methods for introducing cloned genomic DNA, cDNA, synthetic DNA or other foreign genetic material into a host cell (see, e.g., Sambrook et al., supra). It is only necessary that the particular genetic engineering procedure used be capable of successfully introducing at least one gene into the host cell capable of expressing the nucleotide sequence of interest. Suitable cell include for such cell based assays include both primary hepatocytes and hepatocyte cell lines, as described herein, e.g., Hep G2 cells, Hep 2 cells, HEP-3B cells, McArdle RH7777 cells, BRL3A cells, and NRL clone 9 cells.

[0147] After the expression vector is introduced into the cells, the transfected cells are cultured under conditions favoring expression of the siRNA sequence. The transfected cells can be used in high throughput assays to identify compounds that directly modulate ApoB expression as well as compounds that modulate expression of genes upstream and downstream of ApoB, thereby mapping genes involved in lipid metabolism pathways. The transfected cells can also be used to determine the effects of silencing ApoB expression on other components of the lipid metabolism pathway. For example, following expression of the siRNA in the cells, expression of other genes (e.g., ApoE, ApoA-I, ApoE, and ApoAV) in the lipid metabolism pathway can be detected to determine the effect of silencing ApoB expression.

IV. Lipid-Based Carrier Systems Containing siRNA

[0148] In one aspect, the present invention provides stabilized nucleic acid-lipid particles (SPLPs or SNALPs) and other lipid-based carrier systems containing the siRNA described herein. Preferably, the lipid-based carrier system is a SNALP. Alternatively, the lipid-based carrier system is a liposome, micelle, virosome, nucleic acid complex, or mixtures thereof.

[0149] Non-limiting examples of alternative lipid-based carrier systems suitable for use in the present invention include polycationic polymer/nucleic acid complexes (see, e.g., U.S. Patent Publication Nos. 20050222064 and 20030185890), cyclodextrin-polymer/nucleic acid complexes (see, e.g., U.S. Patent Publication No. 20040087024), biodegradable poly(β-amino ester) polymer/nucleic acid complexes (see, e.g., U.S. Patent Publication No. 20040071654), pH-sensitive liposomes (see, e.g., U.S. Patent Publication No. 20020192274; AU 2003210303), anionic liposomes (see, e.g., U.S. Patent Publication No. 20030026831), cationic liposomes (see, e.g., U.S. Patent Publication Nos. 20030229040, 20020160038, and 20020012998; U.S. Pat. No. 5,908,635; PCT Publication No. WO 01/72283), antibody-coated liposomes (see, e.g., U.S. Patent Publication No. 20030108597; PCT Publication No. WO 00/50008), reversibly masked lipoplexes (see, e.g., U.S. Patent Publication Nos. 20030180950), cell-type specific liposomes (see, e.g., U.S. Patent Publication No. 20030198664), liposomes containing nucleic acid and peptides (see, e.g., U.S. Pat. No. 6,207,456), microparticles containing polymeric matrices (see, e.g., U.S. Patent Publication No. 20040142475), pH-sensitive lipoplexes (see, e.g., U.S. Patent Publication No. 20020192275), liposomes containing lipids derivatized with releasable hydrophilic polymers (see, e.g., U.S. Patent Publication No. 20030031704), lipid-entrapped nucleic acid (see, e.g., PCT Publication Nos. WO 03/057190 and WO 03/059322), lipid-encapsulated nucleic acid (see, e.g., U.S. Patent Publication No. 20030129221; U.S. Pat. No. 5,756,122), polycationic sterol derivative/nucleic acid complexes (see, e.g., U.S. Pat. No. 6,756,054), other liposomal compositions (see, e.g., U.S. Patent Publication Nos. 20030035829 and 20030072794; U.S. Pat. No. 6,200,599), other microparticle compositions (see, e.g., U.S. Patent Publication No. 20030157030), polyplexes (see, e.g., PCT Publication No. WO 03/066069), emulsion compositions (see, e.g., U.S. Pat. No. 6,747,014), condensed nucleic acid complexes (see, e.g., U.S. Patent Publication No. 20050123600), other polycationic/nucleic acid complexes (see, e.g., U.S. Patent Publication No. 20030125281), polyvinylether/nucleic acid complexes (see, e.g., U.S. Patent Publication No. 20040156909), polycyclic amidinium/nucleic acid complexes (see, e.g., U.S. Patent Publication No. 20030220289), nanocapsule and microcapsule compositions (see, e.g., AU 2002358514; PCT Publication No. WO 02/096551), stabilized mixtures of liposomes and emulsions (see, e.g., EP1304160), porphyrin/nucleic acid complexes (see, e.g., U.S. Pat. No. 6,620,805), lipid-nucleic acid complexes (see, e.g., U.S. Patent Publication No. 20030203865), nucleic acid micro-emulsions (see, e.g., U.S. Patent Publication No. 20050037086), and cationic lipid-based compositions (see, e.g., U.S. Patent Publication No. 20050234232). One skilled in the art will appreciate that the anti-ApoB siRNA of the present invention can also be delivered as a naked siRNA molecule.

V. Stable Nucleic Acid-Lipid Particles (SNALPs) and Properties Thereof

[0150] The stable nucleic acid-lipid particles or, alternatively, SNALPs typically comprise an siRNA molecule that targets ApoB expression, a cationic lipid (e.g., a cationic lipid of Formula I or II) and a non-cationic lipid. The SNALP can further comprise a bilayer stabilizing component (i.e., a conjugated lipid that inhibits aggregation of the SNALPs). Preferably the SNALP comprises an siRNA molecule that targets ApoB expression, a cationic lipid, a non-cationic lipid, and a conjugated lipid that inhibits aggregation of the SNALPs. The nucleic acid-lipid particles may comprise at least 1, 2, 3, 4, 5, or more siRNA molecules comprising the sequences set forth in Table 1, rows A-F of Table 2, and Tables 3-7. In some embodiments, the nucleic acid-lipid particles comprise an siRNA molecule that targets ApoB and an siRNA molecules that targets another gene of interest (e.g., microsomal triglyceride transfer protein (MTP), acyl-CoA cholesterol acyl transferase (ACAT), farnesoid X receptor (FXR), 5-hydroxy-3-methylglutaryl-coenzyme A reductase (HMGR)).

[0151] The SNALPs of the present invention typically have a mean diameter of about 50 nm to about 150 nm, more typically about 60 nm to about 130 nm, more typically about 70 nm to about 110 nm, most typically about 70 to about 90 nm, and are substantially nontoxic. In addition, the nucleic acids present in the SNALPs of the present invention are resistant in aqueous solution to degradation with a nuclease.

[0152] The lipid-nucleic acid particles of the present invention typically comprise a nucleic acid, a cationic lipid, a non-cationic lipid, and can further comprise a PEG-lipid conjugate. The cationic lipid typically comprises from about 2 mol % to about 60 mol %, from about 5 mol % to about 50 mol %, from about 10 mol % to about 45 mol %, from about 20 mol % to about 40 mol %, or from about 30 mol % to about 40 mol % of the total lipid present in said particle. The non-cationic lipid typically comprises from about 5 mol % to about 90 mol %, from about 10 mol % to about 85 mol %, from about 20 mol % to about 80 mol %, from about 30 mol % to about 70 mol %, from about 40 mol % to about 60 mol % or about 48 mol % of the total lipid present in said particle. The PEG-lipid conjugate typically comprises from about 0.5 mol % to about 20 mol %, from about 1.5 mol % to about 18 mol %, from about 4 mol % to about 15 mol %, from about 5 mol % to about 12 mol %, or about 2 mol % of the total lipid present in said particle. The nucleic acid-lipid particles of the present invention may further comprise cholesterol. If present, the cholesterol typically comprises from about 0 mol % to about 10 mol %, about 2 mol % to about 10 mol %, about 10 mol % to about 60 mol %, from about 12 mol % to about 58 mol %, from about 20 mol % to about 55 mol %, or about 48 mol % of the total lipid present in said particle. It will be readily apparent to one of skill in the art that the proportions of the components of the nucleic acid-lipid particles may be varied. For example for systemic delivery, the cationic lipid may comprise from about 5 mol % to about 15 mol % of the total lipid present in said particle and for local or regional delivery, the cationic lipid may comprise from about 30 mol % to about 50 mol %, or about 40 mol % of the total lipid present in the particle.

[0153] A. Cationic Lipids

[0154] Various suitable cationic lipids may be used in the present invention, either alone or in combination with one or more other cationic lipid species or neutral lipid species.

[0155] Suitable cationic lipids include, for example, DLinDMA, DLenDMA, DODAC, DOTMA, DDAB, DOTAP, DOSPA, DOGS, DC-Chol and DMRIE, or combinations thereof. A number of these lipids and related analogs, which are also useful in the present invention, have been described in U.S. Pat. Nos. 5,208,036, 5,264,618, 5,279,833, 5,283,185, 5,753,613 and 5,785,992. Additionally, a number of commercial preparations of cationic lipids are available and can be used in the present invention. These include, for example, LIPOFECTIN® (commercially available cationic liposomes comprising DOTMA and DOPE, from GIBCO/BRL, Grand Island, N.Y., USA); LIPOFECTAMINE® (commercially available cationic liposomes comprising DOSPA and DOPE, from GIBCO/BRL); and TRANSFECTAM® (commercially available cationic liposomes comprising DOGS from Promega Corp., Madison, Wis., USA). In addition, cationic lipids of Formula I and Formula II can be used in the present invention. Cationic lipids of Formula I and II have the following structures: [chemical structure]
wherein R¹ and R² are independently selected and are H or C₁-C₃ alkyls. R³ and R⁴ are independently selected and are alkyl groups having from about 10 to about 20 carbon atoms; at least one of R³ and R⁴ comprises at least two sites of unsaturation. In one embodiment, R³ and R⁴ are both the same, i.e., R³ and R⁴ are both linoleyl (C18), etc. In another embodiment, R³ and R⁴ are different, i.e., R³ is myristyl (C14) and R⁴ is linoleyl (C18). In some embodiments, the cationic lipids of the present invention are symmetrical, i.e., R³ and R⁴ are both the same. In another preferred embodiment, both R³ and R⁴ comprise at least two sites of unsaturation. In some embodiments, R³ and R⁴ are independently selected from dodecadienyl, tetradecadienyl, hexadecadienyl, linoleyl, and icosadienyl. In some embodiments, R³ and R⁴ are both linoleyl. In some embodiments, R³ and R⁴comprise at least three sites of unsaturation and are independently selected from, e.g., dodecatrienyl, tetradectrienyl, hexadecatrienyl, linolenyl, and icosatrienyl.

[0156] The cationic lipids of Formula I and Formula II described herein typically carry a net positive charge at a selected pH, such as physiological pH. It has been surprisingly found that cationic lipids comprising alkyl chains with multiple sites of unsaturation, e.g., at least two or three sites of unsaturation, are particularly useful for forming lipid-nucleic acid particles with increased membrane fluidity. A number of cationic lipids and related analogs, which are also useful in the present invention, have been described in co-pending U.S. Ser. No. 08/316,399; U.S. Pat. Nos. 5,208,036, 5,264,618, 5,279,833 and 5,283,185, and WO 96/10390.

[0157] Additional suitable cationic lipids include, e.g., dioctadecyldimethylammonium (“DODMA”), Distearyldimethylammonium (“DSDMA”), N,N-dioleyl-N,N-dimethylammonium chloride (“DODAC”); N-(2,3-dioleyloxy)propyl)-N,N,N-trimethylammonium chloride (“DOTMA”); N,N-distearyl-N,N-dimethylammonium bromide (“DDAB”); N-(2,3-dioleoyloxy)propyl)-N,N,N-trimethylammonium chloride (“DOTAP”); 3-(N-(N′,N′-dimethylaminoethane)-carbamoyl)cholesterol (“DC-Chol”) and N-(1,2-dimyristyloxyprop-3-yl)-N,N-dimethyl-N-hydroxyethyl ammonium bromide (“DMRIE”). A number of these lipids and related analogs, which are also useful in the present invention, have been described in U.S. Pat. Nos. 5,208,036, 5,264,618, 5,279,833, 5,283,185, 5,753,613 and 5,785,992.

[0158] B. Non-Cationic Lipids

[0159] The non-cationic lipids used in the present invention can be any of a variety of neutral uncharged, zwitterionic or anionic lipids capable of producing a stable complex. They are preferably neutral, although they can alternatively be positively or negatively charged. Examples of non-cationic lipids useful in the present invention include: phospholipid-related materials, such as lecithin, phosphatidylethanolamine, lysolecithin, lysophosphatidylethanolamine, phosphatidylserine, phosphatidylinositol, sphingomyelin, cephalin, cardiolipin, phosphatidic acid, cerebrosides, dicetylphosphate, distearoylphosphatidylcholine (DSPC), dioleoylphosphatidylcholine (DOPC), dipalmitoylphosphatidylcholine (DPPC), dioleoylphosphatidylglycerol (DOPG), dipalmitoylphosphatidylglycerol (DPPG), dioleoyl-phosphatidylethanolamine (DOPE), palmitoyloleoylphosphatidylcholine (POPC), palmitoyloleoyl-phosphatidylethanolamine (POPE) and dioleoyl-phosphatidylethanolamine 4-(N-maleimidomethyl)-cyclohexane-1-carboxylate (DOPE-mal), dipalmitoyl phosphatidyl ethanolamine (DPPE), dimyristoylphosphoethanolamine (DMPE), distearoyl-phosphatidyl-ethanolamine (DSPE), 16-O-monomethyl PE, 16-O-dimethyl PE, 18-1-trans PE, 1-stearoyl-2-oleoyl-phosphatidyethanolamine (SOPE), and 1,2-dielaidoyl-sn-glycero-3-phophoethanolamine (transDOPE). Non-cationic lipids or sterols such as cholesterol may be present. Additional nonphosphorous containing lipids are, e.g., stearylamine, dodecylamine, hexadecylamine, acetyl palmitate, glycerolricinoleate, hexadecyl stereate, isopropyl myristate, amphoteric acrylic polymers, triethanolamine-lauryl sulfate, alkyl-aryl sulfate polyethyloxylated fatty acid amides, dioctadecyldimethyl ammonium bromide and the like, diacylphosphatidylcholine, diacylphosphatidylethanolamine, ceramide, sphingomyelin, cephalin, and cerebrosides. Other lipids such as lysophosphatidylcholine and lysophosphatidylethanolamine may be present. Non-cationic lipids also include polyethylene glycol-based polymers such as PEG 2000, PEG 5000 and polyethylene glycol conjugated to phospholipids or to ceramides (referred to as PEG-Cer), as described in co-pending U.S. Ser. No. 08/316,429.

[0160] In preferred embodiments, the non-cationic lipids are diacylphosphatidylcholine (e.g., distearoylphosphatidylcholine, dioleoylphosphatidylcholine, dipalmitoylphosphatidylcholine and dilinoleoylphosphatidylcholine), diacylphosphatidylethanolamine (e.g., dioleoylphosphatidylethanolamine and palmitoyloleoylphosphatidylethanolamine), ceramide or sphingomyelin. The acyl groups in these lipids are preferably acyl groups derived from fatty acids having C₁₀-C₂₄ carbon chains. More preferably the acyl groups are lauroyl, myristoyl, palmitoyl, stearoyl or oleoyl. In particularly preferred embodiments, the non-cationic lipid can be cholesterol, 1,2-sn-dioleoylphosphatidylethanolamine, or egg sphingomyelin (ESM).

[0161] C. Bilayer Stabilizing Component

[0162] In addition to cationic and non-cationic lipids, the nucleic acid-lipid particles (e.g., SNALPs and SPLPs) of the present invention can further comprise a bilayer stabilizing component (BSC) such as an ATTA-lipid or a PEG-lipid, such as PEG coupled to dialkyloxypropyls (PEG-DAA) as described in, e.g., WO 05/026372, PEG coupled to diacylglycerol (PEG-DAG) as described in, e.g., U.S. Patent Publication Nos. 20030077829 and 2005008689), PEG coupled to phosphatidylethanolamine (PE) (PEG-PE), or PEG conjugated to ceramides, or a mixture thereof (see, U.S. Pat. No. 5,885,613). In one preferred embodiment, the BSC is a conjugated lipid that inhibits aggregation of the nucleic acid-lipid particles. Suitable conjugated lipids include, but are not limited to PEG-lipid conjugates, ATTA-lipid conjugates, cationic-polymer-lipid conjugates (CPLs) or mixtures thereof. In one preferred embodiment, the nucleic acid-lipid particles comprise either a PEG-lipid conjugate or an ATTA-lipid conjugate together with a CPL.

[0163] PEG is a polyethylene glycol, a linear, water-soluble polymer of ethylene PEG repeating units with two terminal hydroxyl groups. PEGs are classified by their molecular weights; for example, PEG 2000 has an average molecular weight of about 2,000 daltons, and PEG 5000 has an average molecular weight of about 5,000 daltons. PEGs are commercially available from Sigma Chemical Co. and other companies and include, for example, the following: monomethoxypolyethylene glycol (MePEG-OH), monomethoxypolyethylene glycol-succinate (MePEG-S), monomethoxypolyethylene glycol-succinimidyl succinate (MePEG-S-NHS), monomethoxypolyethylene glycol-amine (MePEG-NH₂), monomethoxypolyethylene glycol-tresylate (MePEG-TRES), and monomethoxypolyethylene glycol-imidazolyl-carbonyl (MePEG-IM). In addition, monomethoxypolyethyleneglycol-acetic acid (MePEG-CH₂COOH), is particularly useful for preparing the PEG-lipid conjugates including, e.g., PEG-DAA conjugates.

[0164] In some embodiments, the PEG has an average molecular weight of from about 550 daltons to about 10,000 daltons, more preferably of about 750 daltons to about 5,000 daltons, more preferably of about 1,000 daltons to about 5,000 daltons, more preferably of about 1,500 daltons to about 3,000 daltons and, even more preferably, of about 2,000 daltons, or about 750 daltons. The PEG can be optionally substituted by an alkyl, alkoxy, acyl or aryl group. PEG can be conjugated directly to the lipid or may be linked to the lipid via a linker moiety. Any linker moiety suitable for coupling the PEG to a lipid can be used including, e.g., non-ester containing linker moieties and ester-containing linker moieties. In some embodiments, the linker moiety is a non-ester containing linker moiety. As used herein, the term “non-ester containing linker moiety” refers to a linker moiety that does not contain a carboxylic ester bond (—OC(O)—). Suitable non-ester containing linker moieties include, but are not limited to, amido (—C(O)NH—), amino (—NR—), carbonyl (—C(O)—), carbamate (—NHC(O)O—), urea (—NHC(O)NH—), disulphide (—S—S—), ether (—O—), succinyl (—(O)CCH₂CH₂C(O)—), succinamidyl (—NHC(O)CH₂CH₂C(O)NH—), ether, disulphide, etc. as well as combinations thereof (such as a linker containing both a carbamate linker moiety and an amido linker moiety). In some embodiments, a carbamate linker is used to couple the PEG to the lipid.

[0165] In other embodiments, an ester containing linker moiety is used to couple the PEG to the lipid. Suitable ester containing linker moieties include, e.g., carbonate (—OC(O)O—), succinoyl, phosphate esters (—O—(O)POH—O—), sulfonate esters, and combinations thereof.

[0166] Phosphatidylethanolamines having a variety of acyl chain groups of varying chain lengths and degrees of saturation can be conjugated to polyethyleneglycol to form the bilayer stabilizing component. Such phosphatidylethanolamines are commercially available, or can be isolated or synthesized using conventional techniques known to those of skilled in the art. Phosphatidylethanolamines containing saturated or unsaturated fatty acids with carbon chain lengths in the range of C₁₀ to C₂₀ are preferred. Phosphatidylethanolamines with mono- or diunsaturated fatty acids and mixtures of saturated and unsaturated fatty acids can also be used. Suitable phosphatidylethanolamines include, but are not limited to, the following: dimyristoylphosphatidylethanolamine (DMPE), dipalmitoylphosphatidylethanolamine (DPPE), dioleoylphosphatidylethanolamine (DOPE) and distearoylphosphatidylethanolamine (DSPE).

[0167] In some embodiments, the PEG-lipid is a PEG-DAA conjugate has the following formula:

[chemical structure]

[0168] In Formula VI, R¹ and R² are independently selected and are alkyl groups having from about 10 to about 22 carbon atoms. The long-chain alkyl groups can be saturated or unsaturated. Suitable alkyl groups include, but are not limited to, lauryl (C12), myristyl (C14), palmityl (C16), stearyl (C18) and icosyl (C20). In some embodiments, R¹ and R² are the same, i.e., R¹ and R² are both myristyl (i.e., dimyristyl), R¹ and R² are both stearyl (i.e., distearyl), etc. In some embodiments, the alkyl groups are saturated.

[0169] In Formula VI above, “PEG” is a polyethylene glycol having an average molecular weight ranging of about 550 daltons to about 10,000 daltons, about 750 daltons to about 5,000 daltons, about 1,000 daltons to about 5,000 daltons, about 1,500 daltons to about 3,000 daltons, about 2,000 daltons, or about 750 daltons. The PEG can be optionally substituted with alkyl, alkoxy, acyl or aryl. In some embodiments, the terminal hydroxyl group is substituted with a methoxy or methyl group.

[0170] In Formula VI, above, “L” is a non-ester containing linker moiety or an ester containing linker moiety. In some embodiments, L is a non-ester containing linker moiety. Suitable non-ester containing linkers include, but are not limited to, an amido linker moiety, an amino linker moiety, a carbonyl linker moiety, a carbamate linker moiety, a urea linker moiety, an ether linker moiety, a disulphide linker moiety, a succinamidyl linker moiety and combinations thereof. In some embodiments, the non-ester containing linker moiety is a carbamate linker moiety (i.e., a PEG-C-DAA conjugate), an amido linker moiety (i.e., a PEG-A-DAA conjugate), or a succinamidyl linker moiety (i.e., a PEG-S-DAA conjugate).

[0171] The PEG-DAA conjugates are synthesized using standard techniques and reagents known to those of skill in the art. It will be recognized that the PEG-DAA conjugates will contain various amide, amine, ether, thio, carbamate and urea linkages. Those of skill in the art will recognize that methods and reagents for forming these bonds are well known and readily available. See, e.g., March, ADVANCED ORGANIC CHEMISTRY (Wiley 1992), Larock, COMPREHENSIVE ORGANIC TRANSFORMATIONS (VCH 1989); and Furniss, VOGEL'S TEXTBOOK OF PRACTICAL ORGANIC CHEMISTRY 5th ed. (Longman 1989). It will also be appreciated that any functional groups present may require protection and deprotection at different points in the synthesis of the PEG-DAA conjugates. Those of skill in the art will recognize that such techniques are well known. See, e.g., Green and Wuts, PROTECTIVE GROUPS IN ORGANIC SYNTHESIS (Wiley 1991).

[0172] In some embodiments, the PEG-DAA conjugate is a dilauryloxypropyl (C12)-PEG conjugate, dimyristyloxypropyl (C14)-PEG conjugate, a dipalmitoyloxypropyl (C16)-PEG conjugate or a disteryloxypropyl (C18)-PEG conjugate. Those of skill in the art will readily appreciate that other dialkyloxypropyls can be used in the PEG-DAA conjugates of the present invention.

[0173] In addition to the foregoing, it will be readily apparent to those of skill in the art that other hydrophilic polymers can be used in place of PEG. Examples of suitable polymers that can be used in place of PEG include, but are not limited to, polyvinylpyrrolidone, polymethyloxazoline, polyethyloxazoline, polyhydroxypropyl methacrylamide, polymethacrylamide and polydimethylacrylamide, polylactic acid, polyglycolic acid, and derivatized celluloses, such as hydroxymethylcellulose or hydroxyethylcellulose.

[0174] In addition to the foregoing components, the SNALPs and SPLPs of the present invention can further comprise cationic poly(ethylene glycol) (PEG) lipids, or CPLs, that have been designed for insertion into lipid bilayers to impart a positive charge (see, Chen, et al., Bioconj. Chem. 11:433-437 (2000)). Suitable SPLPs and SPLP-CPLs for use in the present invention, and methods of making and using SPLPs and SPLP-CPLs, are disclosed, e.g., in U.S. Pat. No. 6,852,334 and WO 00/62813. Cationic polymer lipids (CPLs) useful in the present invention have the following architectural features: (1) a lipid anchor, such as a hydrophobic lipid, for incorporating the CPLs into the lipid bilayer; (2) a hydrophilic spacer, such as a polyethylene glycol, for linking the lipid anchor to a cationic head group; and (3) a polycationic moiety, such as a naturally occurring amino acid, to produce a protonizable cationic head group.

[0175] Suitable CPL include compounds of Formula VII:
A-W-Y (VII)
wherein A, W and Y are as described below.

[0176] With reference to Formula VII, “A” is a lipid moiety such as an amphipathic lipid, a neutral lipid or a hydrophobic lipid that acts as a lipid anchor. Suitable lipid examples include vesicle-forming lipids or vesicle adopting lipids and include, but are not limited to, diacylglycerolyls, dialkylglycerolyls, N-N-dialkylaminos, 1,2-diacyloxy-3-aminopropanes and 1,2-dialkyl-3-aminopropanes.

[0177] “W” is a polymer or an oligomer, such as a hydrophilic polymer or oligomer. Typically, the hydrophilic polymer is a biocompatable polymer that is nonimmunogenic or possesses low inherent immunogenicity. Alternatively, the hydrophilic polymer can be weakly antigenic if used with appropriate adjuvants. Suitable nonimmunogenic polymers include, but are not limited to, PEG, polyamides, polylactic acid, polyglycolic acid, polylactic acid/polyglycolic acid copolymers and combinations thereof. In some embodiments, the polymer has a molecular weight of from about 250 to about 7000 daltons.

[0178] “Y” is a polycationic moiety. The term polycationic moiety refers to a compound, derivative, or functional group having a positive charge, typically at least 2 positive charges at a selected pH, typically physiological pH. Suitable polycationic moieties include basic amino acids and their derivatives such as arginine, asparagine, glutamine, lysine and histidine; spermine; spermidine; cationic dendrimers; polyamines; polyamine sugars; and amino polysaccharides. The polycationic moieties can be linear, such as linear tetralysine, branched or dendrimeric in structure. Polycationic moieties have between about 2 to about 15 positive charges, between about 2 to about 12 positive charges, or between about 2 to about 8 positive charges at selected pH values. The selection of which polycationic moiety to employ may be determined by the type of liposome application which is desired.

[0179] The charges on the polycationic moieties can be either distributed around the entire liposome moiety, or alternatively, they can be a discrete concentration of charge density in one particular area of the liposome moiety e.g., a charge spike. If the charge density is distributed on the liposome, the charge density can be equally distributed or unequally distributed. All variations of charge distribution of the polycationic moiety are encompassed by the present invention.

[0180] The lipid “A,” and the nonimmunogenic polymer “W,” can be attached by various methods and preferably, by covalent attachment. Methods known to those of skill in the art can be used for the covalent attachment of “A” and “W.” Suitable linkages include, but are not limited to, amide, amine, carboxyl, carbonate, carbamate, ester and hydrazone linkages. It will be apparent to those skilled in the art that “A” and “W” must have complementary functional groups to effectuate the linkage. The reaction of these two groups, one on the lipid and the other on the polymer, will provide the desired linkage. For example, when the lipid is a diacylglycerol and the terminal hydroxyl is activated, for instance with NHS and DCC, to form an active ester, and is then reacted with a polymer which contains an amino group, such as with a polyamide (see, U.S. Pat. Nos. 6,320,017 and 6,586,559), an amide bond will form between the two groups.

[0181] In certain instances, the polycationic moiety can have a ligand attached, such as a targeting ligand or a chelating moiety for complexing calcium. Preferably, after the ligand is attached, the cationic moiety maintains a positive charge. In certain instances, the ligand that is attached has a positive charge. Suitable ligands include, but are not limited to, a compound or device with a reactive functional group and include lipids, amphipathic lipids, carrier compounds, bioaffinity compounds, biomaterials, biopolymers, biomedical devices, analytically detectable compounds, therapeutically active compounds, enzymes, peptides, proteins, antibodies, immune stimulators, radiolabels, fluorogens, biotin, drugs, haptens, DNA, RNA, polysaccharides, liposomes, virosomes, micelles, immunoglobulins, functional groups, other targeting moieties, or toxins.

VI. Preparation of SNALPs

[0182] The present invention provides a method of preparing serum-stable nucleic acid-lipid particles in which an interfering RNA (e.g., an anti-ApoB siRNA) is encapsulated in a lipid bilayer and is protected from degradation. The particles made by the methods of this invention typically have a size of about 50 nm to about 150 nm, about 60 nm to about 130 nm, about 70 nm to about 110 nm, or about 70 nm to about 90 nm. The particles can be formed by any method known in the art including, but not limited to: a continuous mixing method, a direct dilution process, a detergent dialysis method, or a modification of a reverse-phase method which utilizes organic solvents to provide a single phase during mixing of the components.

[0183] In preferred embodiments, the cationic lipids are lipids of Formula I and II or combinations thereof. In other preferred embodiments, the non-cationic lipids are ESM, DOPE, DOPC, DPPE, DMPE, 16:0 Monomethyl Phosphatidylethanolamine, 16:0 Dimethyl Phosphatidylethanolamine, 18:1 Trans Phosphatidylethanolamine, 18:0 18:1 Phosphatidylethanolamine (SOPE), 1,2-dielaidoyl-sn-glycero-3-phophoethanolamine (transDOPE), 16:0 18:1 Phosphatidylethanolamine, DSPE, polyethylene glycol-based polymers (e.g., PEG 2000, PEG 5000, PEG-modified diacylglycerols, or PEG-modified dialkyloxypropyls), distearoylphosphatidylcholine (DSPC), cholesterol, or combinations thereof. In still other preferred embodiments, the organic solvents are methanol, chloroform, methylene chloride, ethanol, diethyl ether or combinations thereof.

[0184] In a particularly preferred embodiment, the present invention provides for nucleic acid-lipid particles produced via a continuous mixing method, e.g., process that includes providing an aqueous solution comprising a nucleic acid such as an siRNA, in a first reservoir, and providing an organic lipid solution in a second reservoir, and mixing the aqueous solution with the organic lipid solution such that the organic lipid solution mixes with the aqueous solution so as to substantially instantaneously produce a liposome encapsulating the nucleic acid (e.g., siRNA). This process and the apparatus for carrying this process are described in detail in U.S. Patent Publication No. 20040142025.

[0185] The action of continuously introducing lipid and buffer solutions into a mixing environment, such as in a mixing chamber, causes a continuous dilution of the lipid solution with the buffer solution, thereby producing a liposome substantially instantaneously upon mixing. As used herein, the phrase “continuously diluting a lipid solution with a buffer solution” (and variations) generally means that the lipid solution is diluted sufficiently rapidly in a hydration process with sufficient force to effectuate vesicle generation. By mixing the aqueous solution comprising a nucleic acid with the organic lipid solution, the organic lipid solution undergoes a continuous stepwise dilution in the presence of the buffer solution (i.e., aqueous solution) to produce a nucleic acid-lipid particle.

[0186] The serum-stable nucleic acid-lipid particles formed using the continuous mixing method typically have a size of from about 50 nm to about 150 nm, from about 60 nm to about 130 nm, from about 70 nm to about 110 nm, or from about 70 nm to about 90 nm. The particles thus formed do not aggregate and are optionally sized to achieve a uniform particle size.

[0187] In another embodiment, the present invention provides for nucleic acid-lipid particles produced via a direct dilution process that includes forming a liposome solution and immediately and directly introducing the liposome solution into a collection vessel containing a controlled amount of dilution buffer. In preferred aspects, the collection vessel includes one or more elements configured to stir the contents of the collection vessel to facilitate dilution. In one aspect, the amount of dilution buffer present in the collection vessel is substantially equal to the volume of liposome solution introduced thereto. As a non-limiting example, liposome solution in 45% ethanol when introduced into the collection vessel containing an equal volume of ethanol will advantageously yield smaller particles in about 22.5%, about 20%, or about 15% ethanol.

[0188] In even another embodiment, the present invention provides for nucleic acid-lipid particles produced via a direct dilution process in which a third reservoir containing dilution buffer is fluidly coupled to a second mixing region. In this embodiment, the liposome solution formed in a first mixing region is immediately and directly mixed with dilution buffer in the second mixing region. In preferred aspects, the second mixing region includes a T-connector arranged so that the liposome solution and the dilution buffer flows meet as opposing 180° flows, however, connectors providing shallower angles can be used, e.g., from about 27° to about 180°. A pump mechanism delivers a controllable flow of buffer to the second mixing region. In one aspect, the flow rate of dilution buffer provided to the second mixing region is controlled to be substantially equal to the flow rate of liposome solution introduced thereto from the first mixing region. This embodiment advantageously allows for more control of the flow of dilution buffer mixing with the liposome solution in the second mixing region, and therefore also the concentration of liposome solution in buffer throughout the second mixing process. Such control of the dilution buffer flow rate advantageously allows for small particle size formation at reduced concentrations.

[0189] These processes and the apparati for carrying out these direct dilution processes is described in detail in U.S. Provisional Patent Application No. 60/703,380 filed Jul. 27, 2005.

[0190] The serum-stable nucleic acid-lipid particles formed using the direct dilution process typically have a size of from about of from about 50 nm to about 150 nm, from about 60 nm to about 130 nm, from about 70 nm to about 110 nm, or from about 70 nm to about 90 nm. The particles thus formed do not aggregate and are optionally sized to achieve a uniform particle size.

[0191] In some embodiments, the particles are formed using detergent dialysis. Without intending to be bound by any particular mechanism of formation, a plasmid or other nucleic acid (e.g., siRNA) is contacted with a detergent solution of cationic lipids to form a coated nucleic acid complex. These coated nucleic acids can aggregate and precipitate. However, the presence of a detergent reduces this aggregation and allows the coated nucleic acids to react with excess lipids (typically, non-cationic lipids) to form particles in which the plasmid or other nucleic acid is encapsulated in a lipid bilayer. Thus, serum-stable nucleic acid-lipid particles can be prepared as follows:
[0192] (a) combining a nucleic acid with cationic lipids in a detergent solution to form a coated nucleic acid-lipid complex;
[0193] (b) contacting non-cationic lipids with the coated nucleic acid-lipid complex to form a detergent solution comprising a nucleic acid-lipid complex and non-cationic lipids; and
[0194] (c) dialyzing the detergent solution of step (b) to provide a solution of serum-stable nucleic acid-lipid particles, wherein the nucleic acid is encapsulated in a lipid bilayer and the particles are serum-stable and have a size of from about 50 to about 150 nm.

[0195] An initial solution of coated nucleic acid-lipid complexes is formed by combining the nucleic acid with the cationic lipids in a detergent solution.

[0196] In these embodiments, the detergent solution is preferably an aqueous solution of a neutral detergent having a critical micelle concentration of 15-300 mM, more preferably 20-50 mM. Examples of suitable detergents include, for example, N,N′-((octanoylimino)-bis-(trimethylene))-bis-(D-gluconamide) (BIGCHAP); BRIJ 35; Deoxy-BIGCHAP; dodecylpoly(ethylene glycol) ether; Tween 20; Tween 40; Tween 60; Tween 80; Tween 85; Mega 8; Mega 9; Zwittergent® 3-08; Zwittergent® 3-10; Triton X-405; hexyl-, heptyl-, octyl- and nonyl-β-D-glucopyranoside; and heptylthioglucopyranoside; with octyl β-D-glucopyranoside and Tween-20 being the most preferred. The concentration of detergent in the detergent solution is typically about 100 mM to about 2 M, preferably from about 200 mM to about 1.5 M.

[0197] The cationic lipids and nucleic acids will typically be combined to produce a charge ratio (+/−) of about 1:1 to about 20:1, in a ratio of about 1:1 to about 12:1, or in a ratio of about 2:1 to about 6:1. Additionally, the overall concentration of nucleic acid in solution will typically be from about 25 μg/mL to about 1 mg/mL, from about 25 μg/mL to about 200 μg/mL, or from about 50 μg/mL to about 100 μg/mL. The combination of nucleic acids and cationic lipids in detergent solution is kept, typically at room temperature, for a period of time which is sufficient for the coated complexes to form. Alternatively, the nucleic acids and cationic lipids can be combined in the detergent solution and warmed to temperatures of up to about 37° C., about 50° C., about 60° C., or about 70° C. For nucleic acids which are particularly sensitive to temperature, the coated complexes can be formed at lower temperatures, typically down to about 4° C.

[0198] In some embodiments, the nucleic acid to lipid ratios (mass/mass ratios) in a formed nucleic acid-lipid particle will range from about 0.01 to about 0.2, from about 0.03 to about 0.01 or from about 0.01 to about 0.08. The ratio of the starting materials also falls within this range. In other embodiments, the nucleic acid-lipid particle preparation uses about 400 μg nucleic acid per 10 mg total lipid or a nucleic acid to lipid ratio (mg:mg) of about 0.01 to about 0.08 and, more preferably, about 0.04, which corresponds to 1.25 mg of total lipid per 50 μg of nucleic acid.

[0199] The detergent solution of the coated nucleic acid-lipid complexes is then contacted with non-cationic lipids to provide a detergent solution of nucleic acid-lipid complexes and non-cationic lipids. The non-cationic lipids which are useful in this step include, diacylphosphatidylcholine, diacylphosphatidylethanolamine, ceramide, sphingomyelin, cephalin, cardiolipin, and cerebrosides. In preferred embodiments, the non-cationic lipids are diacylphosphatidylcholine, diacylphosphatidylethanolamine, ceramide or sphingomyelin. The acyl groups in these lipids are preferably acyl groups derived from fatty acids having C₁₀-C₂₄ carbon chains. More preferably the acyl groups are lauroyl, myristoyl, palmitoyl, stearoyl or oleoyl. In particularly preferred embodiments, the non-cationic lipid will be 1,2-sn-dioleoylphosphatidylethanolamine (DOPE), palmitoyl oleoyl phosphatidylcholine (POPC), egg phosphatidylcholine (EPC), distearoylphosphatidylcholine (DSPC), cholesterol, or a mixture thereof. In the most preferred embodiments, the nucleic acid-lipid particles will be fusogenic particles with enhanced properties in vivo and the non-cationic lipid will be DSPC or DOPE. In addition, the nucleic acid-lipid particles of the present invention may further comprise cholesterol. In other preferred embodiments, the non-cationic lipids will further comprise polyethylene glycol-based polymers such as PEG 2000, PEG 5000 and polyethylene glycol conjugated to a diacylglycerol, a ceramide or a phospholipid, as described in U.S. Pat. No. 5,820,873 and U.S. Patent Publication No. 20030077829. In further preferred embodiments, the non-cationic lipids will further comprise polyethylene glycol-based polymers such as PEG 2000, PEG 5000 and polyethylene glycol conjugated to a dialkyloxypropyl.

[0200] The amount of non-cationic lipid which is used in the present methods is typically about 2 to about 20 mg of total lipids to 50 μg of nucleic acid. Preferably, the amount of total lipid is from about 5 to about 10 mg per 50 μg of nucleic acid.

[0201] Following formation of the detergent solution of nucleic acid-lipid complexes and non-cationic lipids, the detergent is removed, preferably by dialysis. The removal of the detergent results in the formation of a lipid-bilayer which surrounds the nucleic acid providing serum-stable nucleic acid-lipid particles which have a size of from about 50 nm to about 150 nm, more typically about 100 nm to about 130 nm, more typically about 110 nm to about 115 nm, most typically about 65 to 95 nm. The particles thus formed do not aggregate and are optionally sized to achieve a uniform particle size.

[0202] The serum-stable nucleic acid-lipid particles can be sized by any of the methods available for sizing liposomes. The sizing may be conducted in order to achieve a desired size range and relatively narrow distribution of particle sizes.

[0203] Several techniques are available for sizing the particles to a desired size. One sizing method, used for liposomes and equally applicable to the present particles is described in U.S. Pat. No. 4,737,323. Sonicating a particle suspension either by bath or probe sonication produces a progressive size reduction down to particles of less than about 50 nm in size. Homogenization is another method which relies on shearing energy to fragment larger particles into smaller ones. In a typical homogenization procedure, particles are recirculated through a standard emulsion homogenizer until selected particle sizes, typically between about 60 and about 80 nm, are observed. In both methods, the particle size distribution can be monitored by conventional laser-beam particle size discrimination, or QELS.

[0204] Extrusion of the particles through a small-pore polycarbonate membrane or an asymmetric ceramic membrane is also an effective method for reducing particle sizes to a relatively well-defined size distribution. Typically, the suspension is cycled through the membrane one or more times until the desired particle size distribution is achieved. The particles may be extruded through successively smaller-pore membranes, to achieve a gradual reduction in size.

[0205] In another group of embodiments, the present invention provides a method for the preparation of serum-stable nucleic acid-lipid particles, comprising:
[0206] (a) preparing a mixture comprising cationic lipids and non-cationic lipids in an organic solvent;
[0207] (b) contacting an aqueous solution of nucleic acid with the mixture in step (a) to provide a clear single phase; and
[0208] (c) removing the organic solvent to provide a suspension of nucleic acid-lipid particles, wherein the nucleic acid is encapsulated in a lipid bilayer, and the particles are stable in serum and have a size of from about 50 to about 150 nm.

[0209] The nucleic acids (e.g., siRNA), cationic lipids and non-cationic lipids which are useful in this group of embodiments are as described for the detergent dialysis methods above.

[0210] The selection of an organic solvent will typically involve consideration of solvent polarity and the ease with which the solvent can be removed at the later stages of particle formation. The organic solvent, which is also used as a solubilizing agent, is in an amount sufficient to provide a clear single phase mixture of nucleic acid and lipids. Suitable solvents include, but are not limited to, chloroform, dichloromethane, diethylether, cyclohexane, cyclopentane, benzene, toluene, methanol, or other aliphatic alcohols such as propanol, isopropanol, butanol, tert-butanol, iso-butanol, pentanol and hexanol. Combinations of two or more solvents may also be used in the present invention.

[0211] Contacting the nucleic acid with the organic solution of cationic and non-cationic lipids is accomplished by mixing together a first solution of nucleic acid, which is typically an aqueous solution, and a second organic solution of the lipids. One of skill in the art will understand that this mixing can take place by any number of methods, for example by mechanical means such as by using vortex mixers.

[0212] After the nucleic acid has been contacted with the organic solution of lipids, the organic solvent is removed, thus forming an aqueous suspension of serum-stable nucleic acid-lipid particles. The methods used to remove the organic solvent will typically involve evaporation at reduced pressures or blowing a stream of inert gas (e.g., nitrogen or argon) across the mixture.

[0213] The serum-stable nucleic acid-lipid particles thus formed will typically be sized from about 50 nm to about 150 nm, more typically about 100 nm to about 130 nm, most typically about 110 nm to about 115 nm. To achieve further size reduction or homogeneity of size in the particles, sizing can be conducted as described above.

[0214] In other embodiments, the methods will further comprise adding non-lipid polycations which are useful to effect the delivery to cells using the present compositions. Examples of suitable non-lipid polycations include, but are limited to, hexadimethrine bromide (sold under the brand name POLYBRENE®, from Aldrich Chemical Co., Milwaukee, Wis., USA) or other salts of heaxadimethrine. Other suitable polycations include, for example, salts of poly-L-ornithine, poly-L-arginine, poly-L-lysine, poly-D-lysine, polyallylamine and polyethyleneimine.

[0215] In certain embodiments, the formation of the nucleic acid-lipid particles can be carried out either in a mono-phase system (e.g., a Bligh and Dyer monophase or similar mixture of aqueous and organic solvents) or in a two-phase system with suitable mixing.

[0216] When formation of the complexes is carried out in a mono-phase system, the cationic lipids and nucleic acids are each dissolved in a volume of the mono-phase mixture. Combination of the two solutions provides a single mixture in which the complexes form. Alternatively, the complexes can form in two-phase mixtures in which the cationic lipids bind to the nucleic acid (which is present in the aqueous phase), and “pull” it into the organic phase.

[0217] In another embodiment, serum-stable nucleic acid-lipid particles can be prepared as follows:
[0218] (a) contacting nucleic acids with a solution comprising non-cationic lipids and a detergent to form a nucleic acid-lipid mixture;
[0219] (b) contacting cationic lipids with the nucleic acid-lipid mixture to neutralize a portion of the negative charge of the nucleic acids and form a charge-neutralized mixture of nucleic acids and lipids; and
[0220] (c) removing the detergent from the charge-neutralized mixture to provide the nucleic acid-lipid particles in which the nucleic acids are protected from degradation.

[0221] In one group of embodiments, the solution of non-cationic lipids and detergent is an aqueous solution. Contacting the nucleic acids with the solution of non-cationic lipids and detergent is typically accomplished by mixing together a first solution of nucleic acids and a second solution of the lipids and detergent. One of skill in the art will understand that this mixing can take place by any number of methods, for example, by mechanical means such as by using vortex mixers. Preferably, the nucleic acid solution is also a detergent solution. The amount of non-cationic lipid which is used in the present method is typically determined based on the amount of cationic lipid used, and is typically of from about 0.2 to 5 times the amount of cationic lipid, preferably from about 0.5 to about 2 times the amount of cationic lipid used.

[0222] In some embodiments, the nucleic acids are precondensed as described in, e.g., U.S. patent application Ser. No. 09/744,103.

[0223] The nucleic acid-lipid mixture thus formed is contacted with cationic lipids to neutralize a portion of the negative charge which is associated with the nucleic acids (or other polyanionic materials) present. The amount of cationic lipids used will typically be sufficient to neutralize at least 50% of the negative charge of the nucleic acid. Preferably, the negative charge will be at least 70% neutralized, more preferably at least 90% neutralized. Cationic lipids which are useful in the present invention, include, for example, DLinDMA and, DLenDMA. These lipids and related analogs have been described in U.S. Provisional Patent Application Nos. 60/578,075, filed Jun. 7, 2004; 60/610,746, filed Sep. 17, 2004; and 60/679,427, filed May 9, 2005.

[0224] Contacting the cationic lipids with the nucleic acid-lipid mixture can be accomplished by any of a number of techniques, preferably by mixing together a solution of the cationic lipid and a solution containing the nucleic acid-lipid mixture. Upon mixing the two solutions (or contacting in any other manner), a portion of the negative charge associated with the nucleic acid is neutralized. Nevertheless, the nucleic acid remains in an uncondensed state and acquires hydrophilic characteristics.

[0225] After the cationic lipids have been contacted with the nucleic acid-lipid mixture, the detergent (or combination of detergent and organic solvent) is removed, thus forming the nucleic acid-lipid particles. The methods used to remove the detergent will typically involve dialysis. When organic solvents are present, removal is typically accomplished by evaporation at reduced pressures or by blowing a stream of inert gas (e.g., nitrogen or argon) across the mixture.

[0226] The particles thus formed will typically be sized from about 50 nm to several microns, more typically about 50 nm to about 150 nm, even more typically about 100 nm to about 130 nm, most typically about 110 nm to about 115 nm. To achieve further size reduction or homogeneity of size in the particles, the nucleic acid-lipid particles can be sonicated, filtered or subjected to other sizing techniques which are used in liposomal formulations and are known to those of skill in the art.

[0227] In other embodiments, the methods will further comprise adding non-lipid polycations which are useful to effect the lipofection of cells using the present compositions. Examples of suitable non-lipid polycations include, hexadimethrine bromide (sold under the brand name POLYBRENE®, from Aldrich Chemical Co., Milwaukee, Wis., USA) or other salts of hexadimethrine. Other suitable polycations include, for example, salts of poly-L-ornithine, poly-L-arginine, poly-L-lysine, poly-D-lysine, polyallylamine and polyethyleneimine. Addition of these salts is preferably after the particles have been formed.

[0228] In another aspect, the serum-stable nucleic acid-lipid particles can be prepared as follows:
[0229] (a) contacting an amount of cationic lipids with nucleic acids in a solution; the solution comprising from about 15-35% water and about 65-85% organic solvent and the amount of cationic lipids being sufficient to produce a +/− charge ratio of from about 0.85 to about 2.0, to provide a hydrophobic nucleic acid-lipid complex;
[0230] (b) contacting the hydrophobic, nucleic acid-lipid complex in solution with non-cationic lipids, to provide a nucleic acid-lipid mixture; and
[0231] (c) removing the organic solvents from the nucleic acid-lipid mixture to provide nucleic acid-lipid particles in which the nucleic acids are protected from degradation.

[0232] The nucleic acids, non-cationic lipids, cationic lipids and organic solvents which are useful in this aspect of the invention are the same as those described for the methods above which used detergents. In one group of embodiments, the solution of step (a) is a mono-phase. In another group of embodiments, the solution of step (a) is two-phase.

[0233] In preferred embodiments, the non-cationic lipids are ESM, DOPE, DOPC, polyethylene glycol-based polymers (e.g., PEG 2000, PEG 5000, PEG-modified diacylglycerols, or PEG-modified dialkyloxypropyls), distearoylphosphatidylcholine (DSPC), DPPE, DMPE, 16:0 Monomethyl Phosphatidylethanolamine, 16:0 Dimethyl Phosphatidylethanolamine, 18:1 Trans Phosphatidylethanolamine, 18:0 18:1 Phosphatidylethanolamine (SOPE), 1,2-dielaidoyl-sn-glycero-3-phophoethanolamine (transDOPE), 16:0 18:1 Phosphatidylethanolamine, DSPE, cholesterol, or combinations thereof. In still other preferred embodiments, the organic solvents are methanol, chloroform, methylene chloride, ethanol, diethyl ether or combinations thereof.

[0234] In one embodiment, the nucleic acid an interfering RNA (i.e., and anti-ApoB siRNA); the cationic lipid is DLindMA, DLenDMA, DODAC, DDAB, DOTMA, DOSPA, DMRIE, DOGS or combinations thereof; the non-cationic lipid is ESM, DOPE, DAG-PEGs, distearoylphosphatidylcholine (DSPC), DPPE, DMPE, 16:0 Monomethyl Phosphatidylethanolamine, 16:0 Dimethyl Phosphatidylethanolamine, 18:1 Trans Phosphatidylethanolamine, 18:0 18:1 Phosphatidylethanolamine (SOPE), 16:0 18:1 Phosphatidylethanolamine DSPE, cholesterol, or combinations thereof (e.g. DSPC and PEG-DAA); and the organic solvent is methanol, chloroform, methylene chloride, ethanol, diethyl ether or combinations thereof.

[0235] As above, contacting the nucleic acids with the cationic lipids is typically accomplished by mixing together a first solution of nucleic acids and a second solution of the lipids, preferably by mechanical means such as by using vortex mixers. The resulting mixture contains complexes as described above. These complexes are then converted to particles by the addition of non-cationic lipids and the removal of the organic solvent. The addition of the non-cationic lipids is typically accomplished by simply adding a solution of the non-cationic lipids to the mixture containing the complexes. A reverse addition can also be used. Subsequent removal of organic solvents can be accomplished by methods known to those of skill in the art and also described above.

[0236] The amount of non-cationic lipids which is used in this aspect of the invention is typically an amount of from about 0.2 to about 15 times the amount (on a mole basis) of cationic lipids which was used to provide the charge-neutralized nucleic acid-lipid complex. Preferably, the amount is from about 0.5 to about 9 times the amount of cationic lipids used.

[0237] In yet another embodiment, the nucleic acid-lipid particles prepared by the methods described above are either net charge neutral or carry an overall charge which provides the particles with greater transfection activity. Preferably, the nucleic acid component of the particles is a nucleic acid which interferes with the production of an undesired protein. In some embodiments, the nucleic acid comprises an interfering RNA (i.e., an anti-ApoB siRNA), the non-cationic lipid is egg sphingomyelin and the cationic lipid is DLinDMA or DLenDMA. In some embodiments, the nucleic acid comprises an interfering RNA, the non-cationic lipid is a mixture of DSPC and cholesterol, and the cationic lipid is DLinDMA or DLenDMA. In other preferred embodiments, the non-cationic lipid may further comprise cholesterol.

[0238] A variety of general methods for making SNALP-CPLs (CPL-containing SNALPs) are discussed herein. Two general techniques include “post-insertion” technique, that is, insertion of a CPL into for example, a pre-formed SNALP, and the “standard” technique, wherein the CPL is included in the lipid mixture during for example, the SNALP formation steps. The post-insertion technique results in SNALPs having CPLs mainly in the external face of the SNALP bilayer membrane, whereas standard techniques provide SNALPs having CPLs on both internal and external faces. The method is especially useful for vesicles made from phospholipids (which can contain cholesterol) and also for vesicles containing PEG-lipids (such as PEG-DAAs and PEG-DAGs). Methods of making SNALP-CPL, are taught, for example, in U.S. Pat. Nos. 5,705,385, 6,586,410, 5,981,501 6,534,484; 6,852,334; U.S. Patent Publication No. 20020072121; and WO 00/62813.

VII. Kits

[0239] The present invention also provides nucleic acid-lipid particles in kit form. The kit will typically be comprised of a one or more containers containing the compositions of the present inventions, preferably in dehydrated form, with instructions for their rehydration and administration. For example, one container of a kit may hold the dehydrated nucleic acid-lipid particles and another container of the kit may hold a buffer suitable for rehydrating the particles.

VIII. Administration of Nucleic Acid-Lipid Particles

[0240] Once formed, the serum-stable nucleic acid-lipid particles of the present invention are useful for the introduction of nucleic acids (i.e., siRNA that silences expression of ApoB) into cells (e.g., a hepatocyte). Accordingly, the present invention also provides methods for introducing a nucleic acids (e.g., a plasmid or and siRNA) into a cell. The methods are carried out in vitro or in vivo by first forming the particles as described above and then contacting the particles with the cells for a period of time sufficient for delivery of the nucleic acid to the cell to occur.

[0241] The nucleic acid-lipid particles of the present invention can be adsorbed to almost any cell type with which they are mixed or contacted. Once adsorbed, the particles can either be endocytosed by a portion of the cells, exchange lipids with cell membranes, or fuse with the cells. Transfer or incorporation of the nucleic acid portion of the particle can take place via any one of these pathways. In particular, when fusion takes place, the particle membrane is integrated into the cell membrane and the contents of the particle combine with the intracellular fluid.

[0242] The nucleic acid-lipid particles of the present invention can be administered either alone or in mixture with a physiologically-acceptable carrier (such as physiological saline or phosphate buffer) selected in accordance with the route of administration and standard pharmaceutical practice. Generally, normal saline will be employed as the pharmaceutically acceptable carrier. Other suitable carriers include, e.g., water, buffered water, 0.4% saline, 0.3% glycine, and the like, including glycoproteins for enhanced stability, such as albumin, lipoprotein, globulin, etc.

[0243] The pharmaceutical carrier is generally added following particle formation. Thus, after the particle is formed, the particle can be diluted into pharmaceutically acceptable carriers such as normal saline.

[0244] The concentration of particles in the pharmaceutical formulations can vary widely, i.e., from less than about 0.05%, usually at or at least about 2-5% to as much as 10 to 30% by weight and will be selected primarily by fluid volumes, viscosities, etc., in accordance with the particular mode of administration selected. For example, the concentration may be increased to lower the fluid load associated with treatment. This may be particularly desirable in patients having atherosclerosis-associated congestive heart failure or severe hypertension. Alternatively, particles composed of irritating lipids may be diluted to low concentrations to lessen inflammation at the site of administration.

[0245] The pharmaceutical compositions of the present invention may be sterilized by conventional, well known sterilization techniques. Aqueous solutions can be packaged for use or filtered under aseptic conditions and lyophilized, the lyophilized preparation being combined with a sterile aqueous solution prior to administration. The compositions can contain pharmaceutically acceptable auxiliary substances as required to approximate physiological conditions, such as pH adjusting and buffering agents, tonicity adjusting agents and the like, for example, sodium acetate, sodium lactate, sodium chloride, potassium chloride, and calcium chloride. Additionally, the particle suspension may include lipid-protective agents which protect lipids against free-radical and lipid-peroxidative damages on storage. Lipophilic free-radical quenchers, such as alphatocopherol and water-soluble iron-specific chelators, such as ferrioxamine, are suitable.

[0246] The nucleic acid-lipid particles can be incorporated into a broad range of topical dosage forms including, but not limited to, gels, oils, emulsions, topical creams, pastes, ointments, lotions, foams, and the like.

[0247] A. In Vivo Administration

[0248] Systemic delivery for in vivo gene therapy, i.e., delivery of a therapeutic nucleic acid to a distal target cell via body systems such as the circulation, has been achieved using nucleic acid-lipid particles such as those disclosed in WO 96/40964, U.S. Pat. Nos. 5,705,385, 5,976,567, 5,981,501, and 6,410,328. This latter format provides a fully encapsulated nucleic acid-lipid particle that protects the nucleic acid from nuclease degradation in serum, is nonimmunogenic, is small in size and is suitable for repeat dosing.

[0249] For in vivo administration, administration can be in any manner known in the art, e.g., by injection, oral administration, inhalation (e.g., intransal or intratracheal), transdermal application, or rectal administration. Administration can be accomplished via single or divided doses. The pharmaceutical compositions can be administered parenterally, i.e., intraarticularly, intravenously, intraperitoneally, subcutaneously, or intramuscularly. In some embodiments, the pharmaceutical compositions are administered intravenously or intraperitoneally by a bolus injection (see, e.g., Stadler, et al., U.S. Pat. No. 5,286,634). Intracellular nucleic acid delivery has also been discussed in Straubringer, et al., Methods Enzymol, Academic Press, New York. 101:512 (1983); Mannino, et al., Biotechniques 6:682 (1988); Nicolau, et al., Crit. Rev. Ther. Drug Carrier Syst. 6:239 (1989), and Behr, Acc. Chem. Res. 26:274 (1993). Still other methods of administering lipid based therapeutics are described in, for example, Rahman et al., U.S. Pat. No. 3,993,754; Sears, U.S. Pat. No. 4,145,410; Papahadjopoulos et al., U.S. Pat. No. 4,235,871; Schneider, U.S. Pat. No. 4,224,179; Lenk et al., U.S. Pat. No. 4,522,803; and Fountain et al., U.S. Pat. No. 4,588,578. The lipid nucleic acid particles can be administered by direct injection at the site of disease or by injection at a site distal from the site of disease (see, e.g., Culver, HUMAN GENE THERAPY, MaryAnn Liebert, Inc., Publishers, New York. pp. 70-71 (1994)).

[0250] The compositions of the present invention, either alone or in combination with other suitable components, can be made into aerosol formulations (i.e., they can be “nebulized”) to be administered via inhalation (e.g., intranasally or intratracheally) (see, Brigham, et al., Am. J. Sci. 298(4):278 (1989)). Aerosol formulations can be placed into pressurized acceptable propellants, such as dichlorodifluoromethane, propane, nitrogen, and the like.

[0251] Formulations suitable for parenteral administration, such as, for example, by intraarticular (in the joints), intravenous, intramuscular, intradermal, intraperitoneal, and subcutaneous routes, include aqueous and non-aqueous, isotonic sterile injection solutions, which can contain antioxidants, buffers, bacteriostats, and solutes that render the formulation isotonic with the blood of the intended recipient, and aqueous and non-aqueous sterile suspensions that can include suspending agents, solubilizers, thickening agents, stabilizers, and preservatives. In the practice of this invention, compositions can be administered, for example, by intravenous infusion, orally, topically, intraperitoneally, intravesically or intrathecally.

[0252] Formulations suitable for oral administration can consist of (a) liquid solutions, such as an effective amount of the packaged nucleic acid suspended in diluents, such as water, saline or PEG 400; (b) capsules, sachets or tablets, each containing a predetermined amount of the active ingredient, as liquids, solids, granules or gelatin; (c) suspensions in an appropriate liquid; and (d) suitable emulsions. Tablet forms can include one or more of lactose, sucrose, mannitol, sorbitol, calcium phosphates, corn starch, potato starch, microcrystalline cellulose, gelatin, colloidal silicon dioxide, talc, magnesium stearate, stearic acid, and other excipients, colorants, fillers, binders, diluents, buffering agents, moistening agents, preservatives, flavoring agents, dyes, disintegrating agents, and pharmaceutically compatible carriers. Lozenge forms can comprise the active ingredient in a flavor, e.g., sucrose, as well as pastilles comprising the active ingredient in an inert base, such as gelatin and glycerin or sucrose and acacia emulsions, gels, and the like containing, in addition to the active ingredient, carriers known in the art.

[0253] Generally, when administered intravenously, the nucleic acid-lipid formulations are formulated with a suitable pharmaceutical carrier. Many pharmaceutically acceptable carriers may be employed in the compositions and methods of the present invention. Suitable formulations for use in the present invention are found, for example, in REMINGTON'S PHARMACEUTICAL SCIENCES, Mack Publishing Company, Philadelphia, Pa., 17th ed. (1985). A variety of aqueous carriers may be used, for example, water, buffered water, 0.4% saline, 0.3% glycine, and the like, and may include glycoproteins for enhanced stability, such as albumin, lipoprotein, globulin, etc. Generally, normal buffered saline (135-150 mM NaCl) will be employed as the pharmaceutically acceptable carrier, but other suitable carriers will suffice. These compositions can be sterilized by conventional liposomal sterilization techniques, such as filtration. The compositions may contain pharmaceutically acceptable auxiliary substances as required to approximate physiological conditions, such as pH adjusting and buffering agents, tonicity adjusting agents, wetting agents and the like, for example, sodium acetate, sodium lactate, sodium chloride, potassium chloride, calcium chloride, sorbitan monolaurate, triethanolamine oleate, etc. These compositions can be sterilized using the techniques referred to above or, alternatively, they can be produced under sterile conditions. The resulting aqueous solutions may be packaged for use or filtered under aseptic conditions and lyophilized, the lyophilized preparation being combined with a sterile aqueous solution prior to administration.

[0254] When preparing pharmaceutical preparations of the nucleic acid-lipid particles of the invention, it is preferable to use quantities of the particles which have been purified to reduce or eliminate empty particles or particles with nucleic acid associated with the external surface.

[0255] The methods of the present invention may be practiced in a variety of hosts. Preferred hosts include mammalian species, such as avian (e.g., ducks), primates (e.g., humans and chimpanzees as well as other nonhuman primates), canines, felines, equines, bovines, ovines, caprines, rodents (e.g., rats and mice), lagomorphs, and swine.

[0256] The amount of particles administered will depend upon the ratio of nucleic acid to lipid; the particular nucleic acid used, the disease state being diagnosed; the age, weight, and condition of the patient and the judgment of the clinician; but will generally be between about 0.01 and about 50 mg per kilogram of body weight; preferably between about 0.1 and about 5 mg/kg of body weight or about 10⁸-10¹⁰ particles per injection.

[0257] B. Cells for Delivery of Interfering RNA

[0258] The compositions and methods of the present invention are used to treat a wide variety of cell types, in vivo and in vitro. Suitable cells include, e.g., hematopoietic precursor (stem) cells, fibroblasts, keratinocytes, hepatocytes, endothelial cells, skeletal and smooth muscle cells, osteoblasts, neurons, quiescent lymphocytes, terminally differentiated cells, slow or noncycling primary cells, parenchymal cells, lymphoid cells, epithelial cells, bone cells, and the like.

[0259] In vivo delivery of nucleic acid lipid particles encapsulating an interfering RNA is suited for targeting cells of any type. The methods and compositions can be employed with cells of a wide variety of vertebrates, including mammals, such as, e.g, canines, felines, equines, bovines, ovines, caprines, rodents (e.g., mice, rats and guinea pigs), swine, and primates (e.g. monkeys, chimpanzees, and humans).

[0260] To the extent that tissue culture of cells may be required, it is well known in the art. Freshney (1994) (Culture of Animal Cells, a Manual of Basic Technique, third edition Wiley-Liss, New York), Kuchler et al. (1977) Biochemical Methods in Cell Culture and Virology, Kuchler, R. J., Dowden, Hutchinson and Ross, Inc., and the references cited therein provides a general guide to the culture of cells. Cultured cell systems often will be in the form of monolayers of cells, although cell suspensions are also used.

[0261] C. Detection of SNALPs

[0262] In some embodiments, the nucleic acid-lipid particles are detectable in the subject at about 1, 2, 4, 6, 8, 12, 24, 48, 60, 72, or 96 hours, 6, 8, 10, 12, 14, 16, 18, 19, 22, 24, 25, or 28 days after administration of the particles. For example about 1, 2, 5, 10, 15, 20, 25, 30, 40, or 50% of the particles may be detectable in the subject at each of these time points. The presence of the particles can be detected in the cells, tissues, or other biological samples from the subject. The particles may be detected, e.g., by direct detection of the particles, detection of the interfering RNA sequence, detection of the target sequence of interest (i.e., by detecting expression or reduced expression of the ApoB sequence of interest), detection of a compound modulated by ApoB (e.g., serum cholesterol) or a combination thereof.

[0263] 1. Detection of Particles

[0264] Nucleic acid-lipid particles are detected herein using any methods known in the art. For example, a label can be coupled directly or indirectly to a component of the SNALP or other lipid-based carrier system using methods well known in the art. A wide variety of labels can be used, with the choice of label depending on sensitivity required, ease of conjugation with the SNALP component, stability requirements, and available instrumentation and disposal provisions. Suitable labels include, but are not limited to, spectral labels, such as fluorescent dyes (e.g., fluorescein and derivatives, such as fluorescein isothiocyanate (FITC) and Oregon Green™; rhodamine and derivatives, such Texas red, tetrarhodimine isothiocynate (TRITC), etc., digoxigenin, biotin, phycoerythrin, AMCA, CyDyes™, and the like; radiolabels, such as ³H, ¹²⁵I, ³⁵S, ¹⁴C, ³²P, ³³P, etc.; enzymes, such as horse radish peroxidase, alkaline phosphatase, etc.; spectral colorimetric labels, such as colloidal gold or colored glass or plastic beads, such as polystyrene, polypropylene, latex, etc. The label can be detected using any means known in the art.

[0265] 2. Detection of Nucleic Acids

[0266] Nucleic acids (i.e., siRNA that silence ApoB expression) are detected and quantified herein by any of a number of means well known to those of skill in the art. The detection of nucleic acids proceeds by well known methods such as Southern analysis, Northern analysis, gel electrophoresis, PCR, radiolabeling, scintillation counting, and affinity chromatography. Additional analytic biochemical methods such as spectrophotometry, radiography, electrophoresis, capillary electrophoresis, high performance liquid chromatography (HPLC), thin layer chromatography (TLC), hyperdiffusion chromatography, may also be employed

[0267] The selection of a nucleic acid hybridization format is not critical. A variety of nucleic acid hybridization formats are known to those skilled in the art. For example, common formats include sandwich assays and competition or displacement assays. Hybridization techniques are generally described in “Nucleic Acid Hybridization, A Practical Approach,” Ed. Hames, B. D. and Higgins, S. J., IRL Press, 1985.

[0268] The sensitivity of the hybridization assays may be enhanced through use of a nucleic acid amplification system which multiplies the target nucleic acid being detected. In vitro amplification techniques suitable for amplifying sequences for use as molecular probes or for generating nucleic acid fragments for subsequent subcloning are known. Examples of techniques sufficient to direct persons of skill through such in vitro amplification methods, including the polymerase chain reaction (PCR) the ligase chain reaction (LCR), Qβ-replicase amplification and other RNA polymerase mediated techniques (e.g., NASBA™) are found in Sambrook, et al., In Molecular Cloning: A Laboratory Manual, Cold Spring Harbor Laboratory Press, 2000, and Ausubel et al., SHORT PROTOCOLS IN MOLECULAR BIOLOGY, eds., Current Protocols, a joint venture between Greene Publishing Associates, Inc. and John Wiley & Sons, Inc., (2002), as well as Mullis et al. (1987), U.S. Pat. No. 4,683,202; PCR Protocols A Guide to Methods and Applications (Innis et al. eds) Academic Press Inc. San Diego, Calif. (1990) (Innis); Arnheim & Levinson (Oct. 1, 1990), C&EN 36; The Journal Of NIH Research, 3:81 (1991); (Kwoh et al., PNAS USA 86:1173 (1989); Guatelli et al., PNAS USA 87:1874 (1990); Lomell et al., J. Clin. Chem., 35:1826 (1989); Landegren et al., Science, 241:1077 (1988); Van Brunt, Biotechnology, 8:291 (1990); Wu and Wallace, Gene, 4:560 (1989); Barringer et al., Gene, 89:117 (1990), and Sooknanan and Malek, Biotechnology, 13:563 (1995). Improved methods of cloning in vitro amplified nucleic acids are described in Wallace et al., U.S. Pat. No. 5,426,039. Other methods described in the art are the nucleic acid sequence based amplification (NASBA™, Cangene, Mississauga, Ontario) and Q Beta Replicase systems. These systems can be used to directly identify mutants where the PCR or LCR primers are designed to be extended or ligated only when a select sequence is present. Alternatively, the select sequences can be generally amplified using, for example, nonspecific PCR primers and the amplified target region later probed for a specific sequence indicative of a mutation.

[0269] Oligonucleotides for use as probes, e.g., in in vitro amplification methods, for use as gene probes, or as inhibitor components are typically synthesized chemically according to the solid phase phosphoramidite triester method described by Beaucage and Caruthers, Tetrahedron Letts., 22(20):1859 1862 (1981), e.g., using an automated synthesizer, as described in Needham VanDevanter et al., Nucleic Acids Res., 12:6159 (1984). Purification of oligonucleotides, where necessary, is typically performed by either native acrylamide gel electrophoresis or by anion exchange HPLC as described in Pearson and Regnier, J. Chrom., 255:137 149 (1983). The sequence of the synthetic oligonucleotides can be verified using the chemical degradation method of Maxam and Gilbert (1980) in Grossman and Moldave (eds.) Academic Press, New York, Methods in Enzymology, 65:499.

[0270] An alternative means for determining the level of transcription is in situ hybridization. In situ hybridization assays are well known and are generally described in Angerer et al., Methods Enzymol., 152:649 (1987). In an in situ hybridization assay cells are fixed to a solid support, typically a glass slide. If DNA is to be probed, the cells are denatured with heat or alkali. The cells are then contacted with a hybridization solution at a moderate temperature to permit annealing of specific probes that are labeled. The probes are preferably labeled with radioisotopes or fluorescent reporters.

[0271] D. Detection of an Immune Response

[0272] An immune response to induced by the siRNA (i.e., modified or unmodified siRNA that silence ApoB expression) described herein can be long-lived and can be detected long after administration of the siRNA or nucleic acid-lipid particles containing the siRNA. An immune response to the siRNA can be detected by using immunoassays that detect the presence or absence of cytokines and growth factors e.g., produced by responder cells.

[0273] Suitable immunoassays include the double monoclonal antibody sandwich immunoassay technique of David et al. (U.S. Pat. No. 4,376,110); monoclonal-polyclonal antibody sandwich assays (Wide et al., in Kirkham and Hunter, eds., Radioimmunoassay Methods, E. and S. Livingstone, Edinburgh (1970)); the “Western blot” method of Gordon et al. (U.S. Pat. No. 4,452,901); immunoprecipitation of labeled ligand (Brown et al. (1980) J. Biol. Chem. 255:4980-4983); enzyme-linked immunosorbent assays (ELISA) as described, for example, by Raines et al. (1982) J. Biol. Chem. 257:5154-5160; immunocytochemical techniques, including the use of fluorochromes (Brooks et al. (1980) Clin. Exp. Immunol. 39:477); and neutralization of activity (Bowen-Pope et al. (1984) PNAS USA 81:2396-2400). In addition to the immunoassays described above, a number of other immunoassays are available, including those described in U.S. Pat. Nos. 3,817,827; 3,850,752; 3,901,654; 3,935,074; 3,984,533; 3,996,345; 4,034,074; and 4,098,876.

[0274] Monoclonal antibodies that specifically bind cytokines and growth factors (e.g., Il-6, IL-12, TNF-α, IFN-α, and IFN-γ can be generated using methods known in the art (see, e.g., Kohler and Milstein, Nature 256: 495-497 (1975) and Harlow and Lane, ANTIBODIES, A LABORATORY MANUAL, Cold Spring Harbor Publication, New York (1999)). Generation of monoclonal antibodies has been previously described and can be accomplished by any means known in the art. (Buhring et al. in Hybridoma 1991, Vol. 10, No. 1, pp. 77-78). For example, an animal such as a guinea pig or rat, preferably a mouse is immunized with an immunogenic polypeptide, the antibody-producing cells, preferably splenic lymphocytes, are collected and fused to a stable, immortalized cell line, preferably a myeloma cell line, to produce hybridoma cells which are then isolated and cloned. (U.S. Pat. No. 6,156,882). In some methods, the monoclonal antibody is labeled to facilitate detection.

[0275] The invention will be described in greater detail by way of specific examples. The following examples are offered for illustrative purposes, and are not intended to limit the invention in any manner. Those of skill in the art will readily recognize a variety of noncritical parameters which can be changed or modified to yield essentially the same results.

### EXAMPLES

[0276] The following examples are provided to illustrate, but not to limit the claimed invention.

### Example 1

### Selection of Candidate ApoB siRNA

[0277] Candidate Apolipoprotein B sequences were identified by scanning and Apolipoprotein sequence to identify AA dinucleotide motifs and the 19 nucleotides 3′ of the motif. The following candidate sequences were eliminated: (1) sequences comprising a stretch of 4 or more of the same base in a row; (2) sequences comprising homopolymers of Gs; (3) sequences comprising triple base motifs (GGG, CCC, AAA, or TTT); (4) sequences comprisig stretches of 7 or more G/Cs in a row; and (5) sequences comprising direct repeats of 4 or more bases resulting in internal fold-back structures.

[0278] Reynold's Rational Design criteria was then applied to the remaining candidate sequences to identify sequences with:
[0279] 1. 30%-52% GC Content;
[0280] 2. At least 3 A/Us at positions 15-19 (sense);
[0281] 3. Absence of internal repeats;
[0282] 4. A at position 19 (sense);
[0283] 5. A at position 3 (sense);
[0284] 6. U at position 10 (sense);
[0285] 7. No G/C at position 19 (sense); and
[0286] 8. No G at position 13 (sense).

[0287] Next, the following criteria were removed to identify additional candidate sequences of interest: 30-52% GC (went higher on 1 candidate); the requirement for a AA leader sequence; (no constraints chosen to get 3 candidates)

triplet motifs (found in 5 candidates)

[0288] BLASTn was used to identify sequences that don't cross-hybridize in the mouse genome. Finally, the candidate sequences were scanned to avoid or reduce GUGU, polyU or GU rich sequences. The candidate sequences and their positions are shown in Table 1 below.

TABLE 1

| | | |
|---|---|---|
| Working | Target Sequence | Selected as |

| | | |
|---|---|---|
| Designation | (5′-3′, sense strand only) | Immunostimulatory? |

| | | |
|---|---|---|
| ApoB-148 | GAA GAU GCA ACU CGA UUC A | No |
| ApoB-911 | ACA GUC GCU UCU UCA GUG A | No |
| ApoB-1455 | UGA AUG CAC GGG CAA UGA A | No |
| ApoB-3050 | CGG GAG AAG UGG AGC AGU A | No |
| ApoB-3193 | AGA AGC AGG ACC UUA UCU A | No |
| ApoB-3699 | GGA CAU GGG UUC CAA AUU A | No |
| ApoB-10067 | CCA ATG CTG GAC TTT ATA A | No |
| ApoB-13205 | GCA TGC TTA CTG ATA TAA A | No |
| ApoB-309 | CAA CCA GTG TAC CCT TAA A | Yes |

### Example 2

### Production of Type I Interferons and Inflammatory Cytokines Following Administration of SNALP Encapsulating siRNA Targeting ApoB

[0289] SNALP (30:2:20:48:DLinDMA:PEG-cDMA:DSPC:Chol) encapsulating siRNA targeting ApoB and having the sequences shown in Table 2 were administered to female Balb/C mice at 2.5 mg siRNA/kg.

TABLE 2

| | |
|---|---|
| siRNA | Target Sequence |

| | | | |
|---|---|---|---|
| Identifier | Designation | (5′-3′ sense strand) | Overhang |

| | | | |
|---|---|---|---|
| A | ApoB-148 | GAA GAU GCA ACU CGA UUC A | dTdT |
| B | ApoB-911 | ACA GUC GCU UCU UCA GUG A | dTdT |
| C | ApoB-1455 | UGA AUG CAC GGG CAA UGA A | dTdT |
| D | ApoB-3050 | CGG GAG AAG UGG AGC AGU A | dTdT |
| E | ApoB-3193 | AGA AGC AGG ACC UUA UCU A | dTdT |
| F | ApoB-3699 | GGA CAU GGG UUC CAA AUU A | dTdT |
| G | ApoB-5490 | GAA UGU GGG UGG CAA CUU U | dTdT |
| H | ApoB-6134 | UUA AUG GCU UAG AGG UAA A | dTdT |

[0290] Plasma IFN-α was measured 6 hours after administration of the SNALP using methods known in the art. The results are shown in FIG. 1.

### Example 3

### Production of Type I Interferons and Inflammatory Cytokines Following Contact with SNALP Encapsulating siRNA Targeting ApoB

[0291] SNALP (30:2:20:48:DLinDMA:PEG-cDMA:DSPC:Chol) encapsulating siRNA targeting ApoB and having the sequences shown in Table 1 were incubated with naïve human PBMC. siRNA was present in the culture at either 0.3 μg/ml or 1.0 μg/ml. IFN-α in the culture media was measured after an overnight culture using methods known in the art. The results are shown in FIG. 2.

### Example 4

### In Vitro Silencing of ApoB Expression

[0292] SNALP (30:2:20:48::=DLinDMA:PEG-cDMA:DSPC:Chol) encapsulating 0.93 μg. ml siRNA targeting ApoB and having the sequences shown in Table 2 were incubated with human AML12 cells. ApoB expression was measured 40 hours following contacting the cells with SNALP. As shown in FIG. 3, siRNA of sequence A reduced ApoB expression to 59% of the control samples, siRNA of sequence B reduced ApoB expression to 69% of the control samples, siRNA of sequence C reduced ApoB expression to 66% of the control samples, siRNA of sequence D reduced ApoB expression to 56% of the control samples, siRNA of sequence E reduced ApoB expression to 42% of the control samples, siRNA of sequence F reduced ApoB expression to 67% of the control samples, siRNA of sequence G reduced ApoB expression to 73% of the control samples, siRNA of sequence H reduced ApoB expression to 87% of the control samples.

### Example 5

### In Vivo Silencing of ApoB Expression

[0293] SNALP (30:2:20:48:DLinDMA:PEG-cDMA:DSPC:Chol) encapsulating siRNA targeting ApoB and having Sequences D, E, and F as shown in Table 2 were administered to female Balb/C mice at 2.5 mg siRNA (0.833 mg per siRNA sequence)/kg, once daily for 3 days. ApoB expression was measured 48 hours following administration of SNALP. As shown in FIG. 4, the encapsulated siRNA reduced ApoB expression by 54%.

### Example 6

### In Vivo Silencing of ApoB Expression Using Multiple SNALP Doses

[0294] A female Balb/c mouse model was used to demonstrate the efficacy of a SNALP formulation designed for siRNA delivery to the liver. This study demonstrated SNALP-mediated anti-ApoB activity with regards to dose response and duration of target knockdown in liver ApoB mRNA as well as biologically related parameters such as circulating ApoB protein and total cholesterol in peripheral blood.

[0295] A “2:30:20” (DSPC:Cholesterol:PEG-C-DMA:DLinDMA, 20:48:2:30% molar composition) SNALP formulation was prepared using a Direct Dilution process. SNALP containing either apob-1 or apob-1-mismatch siRNA were prepared at 0.5, 0.25 or 0.125 mg siRNA/ml for administration.

[0296] The siRNA sequences were as follows:

| | | |
|---|---|---|
| sIRNA Duplex | Oligo | Nucleotide Sequence |

| | | |
|---|---|---|
| Name | Strands | (‘5-3’) |

| | | |
|---|---|---|
| apob-1 | sense | GUCAUCACACUGAAUACCAAU |
| apob-1 | antisense | AUUGGUAUUCAGUGUGAUGACAC |
| apob-1-mismatch | sense | GUGAUCAGACUCAAUACGAAU |
| apob-1-mismatch | antisense | AUUCGUAUUGAGUCUGAUCACAC |

Note
apob-1-mismatch is also referred to as “mismatch”.

[0297] Balb/c mice (female, 4 weeks old) were obtained from Harlan Labs. After an acclimation period (of at least 7 days), animals were administered SNALP by intravenous (IV) injection through the tail vein once daily on Study Days 0, 1 & 2 (3 doses total per animal). Dosages were 5, 2.5 or 1.25 mg siRNA per kg body weight, corresponding to 10 ml/kg (rounded to the nearest 10 microlitres). As a control, one group of animals was administered PBS vehicle.

| | # | | | Day 0, 1, 2 | | Sacrifice Time |
|---|---|---|---|---|---|---|
| Group | Mice | Test Article | | Drug Dose | | Point |
| 1 | 5 | PBS Vehicle | | 10 | ml/kg | Day 4 (48 h) |
| 2 | | apob-1 | 2:30:20 | 5 | mg/kg | |
| 3 | | | SNALP | 2.5 | mg/kg | |
| 4 | | | | 1.25 | mg/kg | |
| 5 | | | | 5 | mg/kg | Day 3 (24 h) |
| 6 | | | | | | Day 5 (72 h) |
| 7 | | | | | | Day 7 (120 h) |
| 8 | | apob-1- | | 5 | mg/kg | Day 4 (48 h) |
| 9 | | mismatch | | 2.5 | mg/kg | |
| 10 | | | | 1.25 | mg/kg | |
| 11 | | | | 5 | mg/kg | Day 3 (24 h) |
| 12 | | | | | | Day 5 (72 h) |
| 13 | | | | | | Day 7 (120 h) |

[0298] Body weights were measured daily, and cageside observations of animal behaviour and/or appearance were recorded daily. Animals were sacrificed on Day 3, 4, 5 or 7 (i.e., 24-120 hours after the third and last administration of test article.

[0299] Animals were euthanized with a lethal dose of ketamine/xylazine and blood was collected via cardiac puncture prior to cervical dislocation. Blood was split in a lavendar EDTA microtainer (for plasma) and a SST microtainer (for serum). The liver was removed whole, weighed, and immersed in at least 5 volumes of RNAlater. One lobe of some livers (2 animals of each group) was removed before RNAlater immersion and frozen in O.C.T. (Tissue-Tek 4583) over liquid nitrogen.

[0300] ApoB and GAPDH mRNA levels in liver were measured using a QuantiGene assay kit (Genospectra, USA) according to the manufacturer's instructions. ApoB protein levels in plasma and/or serum were measured using an ELISA method essentially as described by Zlot et al. (Journal of Lipid Research, 1999, 40:76-84). Total cholesterol in plasma and/or serum was measured using an enzymatic method according to manufacturer's instructions (Infinity Cholesterol, Thermo Electron Corp, USA). Tissue sections were prepared from frozen liver lobes and stained with haematoxylin and eosin for standard histological analysis or stained with Oil-Red-O and haematoxylin for detection of lipids.

[0301] As shown in FIG. 5, downregulation of ApoB mRNA in the liver was observed from a dosage level as low as 1.25 mg/kg (per injection) at 48 hours after the last injection. As shown in FIG. 5, treatment with the 5 mg/kg dosage led to a decrease in ApoB expression in terms of liver mRNA of as much as 88%. This silencing was observed as soon as 24 hours and continued without much lessening of effect to 120 hours after the last SNALP administration. Reductions in ApoB protein levels in plasma (up to 91% decrease) corresponded to observed patterns of reduction in liver mRNA. Silencing of ApoB was expected to have additional biologicial consequences and these were measured in the form of lowered serum cholesterol levels (up to 64% decrease) and occurrence of fatty liver as detected by liver weight and appearance as well as Oil-Red-O staining of liver sections for lipid deposits.

### Example 7

### In Vivo Silencing of ApoB Expression Using Multiple SNALP Doses

[0302] A female Balb/c mouse model was used to demonstrate the efficacy of a SNALP formulation designed for siRNA delivery to the liver. This study demonstrated SNALP-mediated anti-ApoB activity with regards to duration of target knockdown in circulating ApoB protein as well as biologically related parameters such as ApoB mRNA in liver and total cholesterol in peripheral blood.

[0303] A “2:30:20” (DSPC:Cholesterol:PEG-C-DMA:DLinDMA, 20:48:2:30% molar composition) SNALP formulation was prepared using a Direct Dilution process. SNALP containing either apob-1 or apob-1-mismatch siRNA were prepared at 0.5 mg siRNA/ml for administration. Liposomes of the same lipid formulation but not containing siRNA (also referred to as “empty particles”) were prepared at a lipid concentration equivalent to siRNA-containing SNALPs.

[0304] The “apob-1” and “apob-1-mismatch” (also referred to as “mismatch”) siRNA sequences were as described in Example 6.

[0305] Balb/c mice (female, 6 weeks old) were obtained from Harlan Labs. After an acclimation period (of at least 7 days), animals were administered SNALP by IV injection through the tail vein once daily on Study Days 0, 1 & 2 (3 doses total per animal). Dosages were 5 mg siRNA per kg body weight, corresponding to 10 ml/kg (rounded to the nearest 10 microlitres). As a control, one group of animals was administered PBS vehicle.

| | # | | Day 0, 1, & 2 | |
|---|---|---|---|---|
| Group | Mice | Test Article | Drug Dose | Sample Collection |
| 1 | 5 | PBS Vehicle | 10 ml/kg | Tail nick on Day |
| 2 | | apob-1 2:30:20 | 5 mg/kg | −4, 3, 4, 5, |
| | | SNALP | | 7, 10, 14 & 17. |
| 3 | | mismatch | | Euth on Day 21 for |
| | | 2:30:20 SNALP | | liver and |
| 4 | | Empty | equiv. [lipid] | blood. |
| | | particles | | |

[0306] Body weights were measured on each day of injection and each day that samples were collected, and cageside observations of animal behaviour and/or appearance were recorded at the same time. Animals were sacrificed on Day 21, 19 days after the third and last administration of test article.

[0307] Animals were euthanized with a lethal dose of ketamine/xylazine and blood was collected via cardiac puncture prior to cervical dislocation. Blood was split in a lavendar EDTA microtainer (for plasma) and a SST microtainer (for serum). The liver was removed whole, weighed, and immersed in at least 5 volumes of RNAlater. One lobe of some livers (2 animals of each group) was removed before RNAlater immersion and frozen in O.C.T. (Tissue-Tek 4583) over liquid nitrogen.

[0308] ApoB and GAPDH mRNA levels in liver were measured using a QuantiGene assay kit (Genospectra, USA) according to the manufacturer's instructions. ApoB protein levels in plasma and/or serum were measured using an ELISA method essentially as described by Zlot et al. (Journal of Lipid Research, 1999, 40:76-84). Total cholesterol in plasma and/or serum was measured using an enzymatic method according to manufacturer's instructions (Infinity Cholesterol, Thermo Electron Corp, USA). Tissue sections were prepared from frozen liver lobes and stained with haematoxylin and eosin for standard histological analysis or stained with Oil-Red-O and haematoxylin for detection of lipids.

[0309] Serum cholesterol levels of mice given apob-1 SNALP were observed to have returned to baseline levels within 15 days of the cessation of treatment. As shown in FIG. 6, decreased ApoB protein levels in plasma were detected through to 19 days after administration of the final dose of SNALP. The small measured decrease in ApoB protein (13%) at 19 days after SNALP administration was correlated to a similar small (21%) decrease in the corresponding ApoB liver mRNA.

### Example 8

### In Vivo Silencing of ApoB Expression Using SNALP Prepared via a Stepwise Dilution Process

[0310] A female Balb/c mouse model was used to demonstrate the efficacy of a SNALP formulation designed for siRNA delivery to the liver. This study demonstrated SNALP-mediated anti-ApoB activity with regards to target knockdown in liver ApoB mRNA as well as biologically related parameters such as circulating ApoB protein and total cholesterol in peripheral blood.

[0311] SNALP containing apob-1 siRNA were prepared at 0.5 mg siRNA/ml for administration. A “2:30:20+10% DODAC” (DSPC:Cholesterol:PEG-C-DMA:DLinDMA:DODAC, 20:38:2:30:10% molar composition) SNALP formulation was prepared using a Stepwise Dilution process. Similarly, “5:30:20” (DSPC:Cholesterol:PEG-C-DMA:DLinDMA:DODAC, 20:45:5:30% molar composition), a “2:30:20 DODMA” (DSPC:Cholesterol:PEG-C-DMA:DODMA, 20:48:2:30% molar composition) and a “2:30:10” (DSPC:Cholesterol:PEG-C-DMA:DLinDMA, 10:58:2:30% molar composition) SNALP formulations were prepared.

[0312] The “apob-1” siRNA sequences were as described in Example 6.

[0313] Balb/c mice (female, 4 weeks old) were obtained from Harlan Labs. After an acclimation period (of at least 7 days), animals were administered SNALP by IV injection through the tail vein once daily on Study Days 0, 1 & 2 (3 doses total per animal). Dosages were 5 mg siRNA per kg body weight, corresponding to 10 ml/kg (rounded to the nearest 10 microlitres). As a control, one group of animals was administered PBS vehicle.

| | | | | Day 0, | | |
|---|---|---|---|---|---|---|
| | # | | | 1, & 2 | | Sample |
| Group | Mice | Test Article | | Drug Dose | | Collection |
| 1 | 5 | PBS vehicle | | 10 | ml/kg | Tail nick at |
| 2 | | apob-1 | 2:30:20 + | 5 | mg/kg | Hour 6. |
| | | | 10% DODAC | | | Euth at |
| 3 | | | 5:30:20 | | | Day 4 for |
| 4 | | | 2:30:20 | | | blood & liver. |
| | | | DODMA | | | |
| 5 | | | 2:30:10 | | | |

[0314] Body weights were measured daily, and cageside observations of animal behaviour and/or appearance were recorded at the same time. Animals were sacrificed on Day 4, 48 hours after the third and last administration of test article.

[0315] Animals were euthanized with a lethal dose of ketamine/xylazine and blood was collected via cardiac puncture prior to cervical dislocation. Blood was split in a lavendar EDTA microtainer (for plasma) and a SST microtainer (for serum). The liver was removed whole, weighed, and immersed in at least 5 volumes of RNAlater.

[0316] ApoB and GAPDH mRNA levels in liver were measured using a QuantiGene assay kit (Genospectra, USA) according to the manufacturer's instructions. ApoB protein levels in plasma and/or serum were measured using an ELISA method essentially as described by Zlot et al. (Journal of Lipid Research, 1999, 40:76-84). Total cholesterol in plasma and/or serum was measured using an enzymatic method according to manufacturer's instructions (Infinity Cholesterol, Thermo Electron Corp, USA). Interferon-α in plasma and/or serum was measured using a commercially available ELISA kit (PBL Biomedical Laboratories, USA) according to the manufacturer's instructions.

[0317] As shown in FIG. 7, downregulation of ApoB mRNA in the liver was observed upon treatment with all four formulations but ranged from 99% decrease to 44% decrease. Reductions in ApoB protein levels in plasma (79, 76, 23, 75% decrease, respectively) roughly corresponded to observed patterns of reduction in liver mRNA. Silencing of ApoB was expected to have additional biologicial consequences and these were measured in the form of lowered serum cholesterol levels (relative difference in decrease more similar to mRNA than to pattern of protein reduction).

### Example 9

### In Vivo Silencing of ApoB Expression Using Multiple Doses of SNALP Comprising Different Cationic Lipids

[0318] A female Balb/c mouse model was used to demonstrate the efficacy of SNALP formulations, containing various cationic lipids, that are designed for siRNA delivery to the liver. This study demonstrated SNALP-mediated anti-ApoB activity with regards to target knockdown in liver ApoB mRNA as well as biologically related parameters such as circulating ApoB protein and total cholesterol in peripheral blood.

[0319] “2:30:20 DODMA” (DSPC:Cholesterol:PEG-C-DMA:DODMA, 20:48:2:30% molar composition) and “2:30:20 DLenDMA” (DSPC:Cholesterol:PEG-C-DMA:DLenDMA, 20:48:2:30% molar composition) SNALP formulations were prepared using a Direct Dilution process. SNALP containing either apob-1 or apob-1-mismatch siRNA were prepared at 0.5 mg siRNA/ml for administration.

[0320] The “apob-1” and “apob-1-mismatch” (also referred to as “mismatch”) siRNA sequences were as described in Example 6.

[0321] Balb/c mice (female, 4 weeks old) were obtained from Harlan Labs. After an acclimation period (of at least 7 days), animals were administered SNALP by IV injection through the tail vein once daily on Study Days 0, 1 & 2 (3 doses total per animal). Dosages were 5 mg siRNA per kg body weight, corresponding to 10 ml/kg (rounded to the nearest 10 microlitres). As a control, one group of animals was administered PBS vehicle.

| | | | | Day 0, 1, 2 | | Day 4 |
|---|---|---|---|---|---|---|
| Group | # Mice | Test Article | | Drug Dose | | Sacrifice |
| 1 | 5 | PBS vehicle | | 10 | ml/kg | Collect liver |
| 2 | | apob-1 | 2:30:20 | 5 | mg/kg | & blood. |
| | | | DODMA | | | |
| 3 | | | 2:30:20 | | | |
| | | | DLenDMA | | | |
| 4 | | apob-1- | 2:30:20 | | | |
| | | mismatch | DODMA | | | |
| 5 | | | 2:30:20 | | | |
| | | | DLenDMA | | | |

[0322] Body weights were measured every day, and cageside observations of animal behaviour and/or appearance were recorded at the same time. Animals were sacrificed on Study Day 4, 48 hours after the third and last administration of test article.

[0323] Animals were euthanized with a lethal dose of ketamine/xylazine and blood was collected via cardiac puncture prior to cervical dislocation. Blood was split in a lavender EDTA microtainer (for plasma) and a SST microtainer (for serum). The liver was removed whole, weighed, and immersed in at least 5 volumes of RNAlater.

[0324] ApoB and GAPDH mRNA levels in liver were measured using a QuantiGene assay kit (Genospectra, USA) according to the manufacturer's instructions. ApoB protein levels in plasma and/or serum were measured using an ELISA method essentially as described by Zlot et al. (Journal of Lipid Research, 1999, 40:76-84). Total cholesterol in plasma and/or serum was measured using an enzymatic method according to manufacturer's instructions (Infinity Cholesterol, Thermo Electron Corp, USA).

[0325] As shown in FIG. 8, downregulation of ApoB mRNA in the liver was observed upon treatment with formulations containing either cationic lipid: 79% silencing with DODMA and 71% silencing with DLenDMA. Reductions in ApoB protein levels in plasma (72 and 52% decrease, respectively) roughly corresponded to observed patterns of reduction in liver mRNA. Silencing of ApoB was expected to have additional biologicial consequences and these were measured in the form of lowered serum cholesterol levels (25 and 14% decrease, respectively).

### Example 10

### In Vivo Silencing of ApoB Expression Using Multiple Doses of SNALP Containing Different Phospholipids

[0326] A female Balb/c mouse model was used to demonstrate the efficacy of SNALP formulations, containing various phospholipids, that are designed for siRNA delivery to the liver. This study demonstrated SNALP-mediated anti-ApoB activity with regards to target knockdown in liver ApoB mRNA as well as biologically related parameters such as circulating ApoB protein and total cholesterol in peripheral blood.

[0327] “2:30:20 DOPE” (DOPE:Cholesterol:PEG-C-DMA:DLinDMA, 20:48:2:30% molar composition), “2:30:20 DSPE” (DSPE:Cholesterol:PEG-C-DMA:DLinDMA, 20:48:2:30% molar composition) and “2:30:20 DPPE” (DPPE:Cholesterol:PEG-C-DMA:DLinDMA, 20:48:2:30% molar composition) SNALP formulations were prepared using a Direct Dilution process. SNALP containing either apob-1 or apob-1-mismatch siRNA were prepared at 0.35 mg siRNA/ml for administration.

[0328] The “apob-1” and “apob-1-mismatch” (also referred to as “mismatch”) siRNA sequences were as described in Example 6.

[0329] Balb/c mice (female, 4 weeks old) were obtained from Harlan Labs. After an acclimation period (of at least 7 days), animals were administered SNALP by IV injection through the tail vein once daily on Study Days 0, 1 & 2 (3 doses total per animal). Dosages were 3.5 mg siRNA per kg body weight, corresponding to 10 ml/kg (rounded to the nearest 10 microlitres). As a control, one group of animals was administered PBS vehicle.

| | | | | Day 0, 1, 2 | | Day 3 |
|---|---|---|---|---|---|---|
| Group | # Mice | Test Article | | Drug Dose | | Collection |
| 1 | 4 | PBS vehicle | | 10 | ml/kg | Collect liver |
| 2 | 4 | apob-1 | 2:30:20 | 3.5 | mg/kg | and blood. |
| | | | DOPE | | | |
| 3 | 4 | | 2:30:20 | | | |
| | | | DSPE | | | |
| 4 | 4 | | 2:30:20 | | | |
| | | | DPPE | | | |
| 5 | 3 | apob-1- | 2:30:20 | | | |
| | | mismatch | DOPE | | | |
| 6 | 3 | | 2:30:20 | | | |
| | | | DSPE | | | |
| 7 | 3 | | 2:30:20 | | | |
| | | | DPPE | | | |

[0330] Body weights were measured each day, and cageside observations of animal behaviour and/or appearance were recorded at the same time. Animals were sacrificed on Study Day 3, 24 hours after the third and last administration of test article.

[0331] Animals were euthanized with a lethal dose of ketamine/xylazine and blood was collected via cardiac puncture prior to cervical dislocation. Blood from each animal was collected into a lavender EDTA microtainer (for plasma). The spleen was removed and weighed. The liver was removed whole, weighed, and immersed in at least 5 volumes of RNAlater.

[0332] ApoB and GAPDH mRNA levels in liver were measured using a QuantiGene assay kit (Genospectra, USA) according to the manufacturer's instructions. ApoB protein levels in plasma and/or serum were measured using an ELISA method essentially as described by Zlot et al. (Journal of Lipid Research, 1999, 40:76-84). Total cholesterol in plasma and/or serum was measured using an enzymatic method according to manufacturer's instructions (Infinity Cholesterol, Thermo Electron Corp, USA).

[0333] As shown in FIG. 9, downregulation of ApoB mRNA in the liver was observed upon treatment with formulations containing any of the phospholipids: 94% silencing with DOPE, 87% silencing with DSPE and 90% silencing with DPPE. The considerable degree of ‘non-specific effect’, which was correlated to the SNALP dosage but not the action of the active apob-1 siRNA, was not unexpected as similar effects have been observed at this time point in other studies (see, e.g., Examples 21 and 22) and are known to be transient. Reductions in ApoB protein levels in plasma were not quantified as samples fell below the lower limit (13%) of the assay. Silencing of ApoB was expected to have additional biological consequences and these were measured in the form of lowered serum cholesterol levels (30, 31 and 40% decrease, respectively).

### Example 11

### In Vivo Silencing of ApoB Expression Using a Single SNALP Dose

[0334] A female Balb/c mouse model was used to demonstrate the efficacy of a SNALP formulation designed for siRNA delivery to the liver. This study demonstrated SNALP-mediated anti-ApoB activity with regards to dose response and duration of target knockdown in in circulating ApoB protein as well as biologically related parameters such as ApoB mRNA in liver and total cholesterol in peripheral blood.

[0335] A “2:30:20” (DSPC:Cholesterol:PEG-C-DMA:DLinDMA, 20:48:2:30% molar composition) SNALP formulation was prepared using a Direct Dilution process. SNALP containing either apob-1 or apob-1-mismatch siRNA were prepared at 0.5 mg siRNA/ml for administration.

[0336] The apob-1 and apob-1-mismatch (also referred to as “mismatch”) siRNA sequences were as described in Example 6.

[0337] Balb/c mice (female, 4 weeks old) were obtained from Harlan Labs. After an acclimation period (of at least 7 days), animals were administered SNALP by IV injection through the tail vein once on Study Day 0 (1 dose total per animal). Dosage was 5 mg siRNA per kg body weight, corresponding to 10 ml/kg (rounded to the nearest 10 microlitres). As a control, one group of animals was administered PBS vehicle.

| | | | | Day 0 | | Sacrifice |
|---|---|---|---|---|---|---|
| | # | | | Drug | | Time |
| Group | Mice | Test Article | | Dose | | Point |
| 1 | 4 | PBS vehicle | | 10 | ml/kg | Day 10 |
| 2 | | apob-1 | 2:30:20 | 5 | mg/kg | Day 1 |
| | | | SNALP | | | |
| 3 | | | | | | Day 3 |
| 4 | | | | | | Day 7 |
| 5 | | | | | | Day 10 |
| 6 | | apob-1- | | | | Day 1 |
| 7 | | mismatch | | | | Day 3 |
| 8 | | | | | | Day 7 |
| 9 | | | | | | Day 10 |

[0338] Body weights were measured on the day of injection and each day that samples were collected, and cageside observations of animal behaviour and/or appearance were recorded at the same time. Animals were sacrificed 1, 3, 7 and 10 days after test article administration.

[0339] Animals were euthanized with a lethal dose of ketamine/xylazine and blood was collected via cardiac puncture prior to cervical dislocation. Blood was split in a lavender EDTA microtainer (for plasma) and a SST microtainer (for serum). The liver was removed whole, weighed, and immersed in at least 5 volumes of RNAlater. One lobe of some livers (2 animals of each group) was removed before RNAlater immersion and frozen in O.C.T. (Tissue-Tek 4583) over liquid nitrogen.

[0340] ApoB and GAPDH mRNA levels in liver were measured using a QuantiGene assay kit (Genospectra, USA) according to the manufacturer's instructions. ApoB protein levels in plasma and/or serum were measured using an ELISA method essentially as described by Zlot et al. (Journal of Lipid Research, 1999, 40:76-84). Total cholesterol in plasma and/or serum was measured using an enzymatic method according to manufacturer's instructions (Infinity Cholesterol, Thermo Electron Corp, USA). Tissue sections were prepared from frozen liver lobes and stained with haematoxylin and eosin for standard histological analysis or stained with Oil-Red-O and haematoxylin for detection of lipids.

[0341] As shown in FIG. 10, SNALP-mediated downregulation of ApoB protein in plasma was observed to have the greatest effect (84% decrease) at 1 day after administration. This silencing effect gradually lessened over the duration of the study period, to as low as 13% decrease at 10 days after SNALP administration. A transient ‘non-specific’ effect, which was correlated to the SNALP dosage but not the action of the active apob-1 siRNA, was observed at Day 1 but this was essentially abolished by Day 3, at which time the specific activity of active SNALP resulted in a 49% decrease in the plasma ApoB protein level. Reductions in ApoB liver mRNA (up to 72% decrease) corresponded to observed patterns of reduction in plasma ApoB protein. Silencing of ApoB was expected to have additional biologicial consequences and these were measured in the form of lowered serum cholesterol levels (up to 24% decrease at Day 3, resolved by Day 10) and occurrence of fatty liver as detected by liver weight and appearance as well as Oil-Red-O staining of liver sections for lipid deposits.

### Example 12

### In Vivo Silencing of ApoB Expression Using a Single SNALP Dose

[0342] A female Balb/c mouse model was used to demonstrate the efficacy of a SNALP formulation designed for siRNA delivery to the liver. This study was performed for method development (use of tail nicks to assay silencing at multiple time points, allowing for a decrease in the number of animals utilized) and demonstrated SNALP-mediated anti-ApoB activity with regards to duration of target knockdown in circulating ApoB protein as well as biologically related parameters such as ApoB mRNA in liver and total cholesterol in peripheral blood.

[0343] A “2:30:20” (DSPC:Cholesterol:PEG-C-DMA:DLinDMA, 20:48:2:30% molar composition) SNALP formulation was prepared using a Direct Dilution process. SNALP containing either apob-1 or apob-1-mismatch siRNA were prepared at 0.5 mg siRNA/ml for administration.

[0344] The “apob-1” and “apob-1-mismatch” (also referred to as “mismatch”) siRNA sequences were as described in Example 6.

[0345] Balb/c mice (female, 4 weeks old) were obtained from Harlan Labs. After an acclimation period (of at least 7 days), animals were administered SNALP by IV injection through the tail vein once on Study Day 0 (1 dose total per animal). Dosage was 5 mg siRNA per kg body weight, corresponding to 10 ml/kg (rounded to the nearest 10 microlitres). As a control, one group of animals was administered PBS vehicle.

| | | | | Day 0 | | |
|---|---|---|---|---|---|---|
| | # | | | Drug | | |
| Group | Mice | Test Article | | Dose | | Sample Collection |
| 1 | 4 | PBS vehicle | | 10 | ml/kg | Tail nicks |
| 2 | | apob-1 | 2:30:20 | 5 | mg/kg | at Hour 6, Day |
| 3 | | apob-1- | SNALP | | | 1, 2 & 3. |
| | | mismatch | | | | Terminal bleed |
| | | | | | | on Day 4 & |
| | | | | | | collect liver. |

[0346] Body weights were measured on the day of injection and each day that samples were collected, and cageside observations of animal behaviour and/or appearance were recorded at the same time. Animals were sacrificed on Day 4, 96 hours after IV administration of test article.

[0347] Animals were euthanized with a lethal dose of ketamine/xylazine and blood was collected via cardiac puncture prior to cervical dislocation. Blood was split in a lavender EDTA microtainer (for plasma) and a SST microtainer (for serum). The liver was removed whole, weighed, and immersed in at least 5 volumes of RNAlater. One lobe of some livers (2 animals of each group) was removed before RNAlater immersion and frozen in O.C.T. (Tissue-Tek 4583) over liquid nitrogen.

[0348] ApoB and GAPDH mRNA levels in liver were measured using a QuantiGene assay kit (Genospectra, USA) according to the manufacturer's instructions. ApoB protein levels in plasma and/or serum were measured using an ELISA method essentially as described by Zlot et al. (Journal of Lipid Research, 1999, 40:76-84). Total cholesterol in plasma and/or serum was measured using an enzymatic method according to manufacturer's instructions (Infinity Cholesterol, Thermo Electron Corp, USA). Tissue sections were prepared from frozen liver lobes and stained with haematoxylin and eosin for standard histological analysis or stained with Oil-Red-O and haematoxylin for detection of lipids. Interferon-alpha in plasma and/or serum was measured using a commercially available ELISA kit (PBL Biomedical Laboratories, USA) according to the manufacturer's instructions.

[0349] As shown in FIG. 11, SNALP-mediated downregulation of ApoB protein in plasma was observed to have the greatest effect (53% decrease) at Hour 24 after administration. This silencing effect gradually lessened over the duration of the study period, to as low as 27% decrease at Hour 96 after SNALP administration. A transient ‘non-specific’ effect, which was correlated to the SNALP dosage but not the action of the active apob-1 siRNA, was observed at Hour 24 but this was essentially abolished by Hour 48, at which time the specific activity of active SNALP resulted in a 34% decrease in the plasma ApoB protein level. At the the sacrifice time point, 96 hours after SNALP administration, reduction in ApoB liver mRNA (30% decrease) corresponded to observed reduction in plasma ApoB protein. Silencing of ApoB was expected to have additional biologicial consequences and these were measured in the form of lowered serum cholesterol levels (21% silencing at Hour 96 ) and occurrence of fatty liver as detected by liver weight and appearance as well as Oil-Red-O staining of liver sections for lipid deposits.

### Example 13

### In Vivo Silencing of ApoB Expression

[0350] A diet-induced high cholesterol mouse model was used to demonstrate the efficacy of liver-targeted anti-ApoB SNALP in lowering total blood cholesterol level. This study demonstrated SNALP-mediated anti-ApoB activity with regards to the extent and duration of the effect of lowering total cholesterol in the blood. Reduction of blood cholesterol is a potentially therapeutic application of SNALP technology.

[0351] A “2:40:10” (DSPC:Cholesterol:PEG-C-DMA:DLinDMA, 10:48:2:40% molar composition) SNALP formulation was prepared using a Direct Dilution process. SNALP containing either apob-1 or apob-1-mismatch siRNA were prepared at 0.5 mg siRNA/ml for administration.

[0352] The “apob-1” and “apob-1-mismatch” (also referred to as “mismatch”) siRNA sequences were as described in Example 6.

[0353] Balb/c and C57BL/6 mice (female, 4 weeks old) were obtained from Harlan Labs. After an acclimation period (of at least 7 days), and after tail nick samples are taken on Study Day 0, animals in selected cages were switched to a high fat diet (a so-called ‘Western diet’, Harlan Teklad # 88137: 0.2% cholesterol, 4.5 kcal/g, 43% calories derived from fat) which will be supplied ad libitum in pellet form. The normal diet was Laboratory Rodent Diet (PMI Nutrition International), containing 12% calories derived from fat and 200 ppm cholesterol, which was supplied in the same manner.

[0354] Blood cholesterol levels in animals fed normal versus high fat diet were monitored for four weeks in order to establish a baseline for the hypercholesterolemia model.

[0355] Body weights were measured twice per week, and cageside observations of animal behaviour and/or appearance were recorded at the same time. Plasma was collected via tail nick once per week up to Study Day 28.

[0356] On Study Day 32, animals were administered SNALP by intravenous (IV) injection through the tail vein once Study Day 0 (1 dose total per animal). Dosage was 5 mg siRNA per kg body weight, corresponding to 10 ml/kg (rounded to the nearest 10 microlitres).

| | # | | | | |
|---|---|---|---|---|---|
| Cage | Mice | Mouse Strain | IV Dose at 5 mg/kg | | Sample Collection |
| 1 | 2 | Balb/c | apob-1 | 2:40:10 | BW 2×/week. |
| | 2 | Normal Diet | mismatch | SNALP | Tail Nick 2×/week |
| 2 | 2 | Balb/c | apob-1 | | for cholesterol, |
| | 2 | High Fat Diet | mismatch | | ApoB protein. |
| 3 | 2 | C57BL/6 | apob-1 | | |
| | 2 | Normal Diet | mismatch | | |
| 4 | 2 | C57BL/6 | apob-1 | | |
| | 2 | High Fat Diet | mismatch | | |

[0357] Body weights were measured twice per week, and cageside observations of animal behaviour and/or appearance were recorded at the same time. Plasma was collected via tail nick twice per week up to Study Day 39.

[0358] Total cholesterol in plasma was measured using an enzymatic method according to manufacturer's instructions (Infinity Cholesterol, Thermo Electron Corp, USA).

[0359] As shown in FIG. 22, IV administration of a single dose of anti-ApoB SNALP completely abrogated the elevated cholesterol levels previously induced by a high fat ‘Western’ diet in female C57BL/6 mice. Similar results were obtained using female Balb/c mice

### Example 14

### In Vivo Silencing of ApoB Expression

[0360] A female Balb/c mouse model was used to demonstrate the efficacy of a SNALP formulation designed for siRNA delivery to the liver. These studies demonstrated SNALP-mediated anti-ApoB activity with regards to dose response and duration of target knockdown in liver ApoB mRNA as well as biologically related parameters such as circulating ApoB protein and total cholesterol in peripheral blood

[0361] A “2:40:10” (DSPC:Cholesterol:PEG-C-DMA:DLinDMA, 10:48:2:40% molar composition) SNALP formulation was prepared using a Direct Dilution process, at a nucleic acid to lipid ratio of 0.039. SNALP containing either apob-1 or apob-1-mismatch siRNA were prepared at 0.2 mg siRNA/ml for administration.

[0362] The “apob-1” and “apob-1-mismatch” (also referred to as “mismatch”) siRNA sequences were as described in Example 6.

[0363] Balb/c mice (female, 4 weeks old) were obtained from Harlan Labs. After an acclimation period (of at least 7 days), animals were administered SNALP by intravenous (IV) injection through the tail vein once on Study Day 0 (1 dose total per animal). Dosage was 2 mg siRNA per kg body weight, corresponding to 10 ml/kg (rounded to the nearest 10 microlitres). As a control, one group of animals was administered PBS vehicle.

| | # | | | Day 0 | | |
|---|---|---|---|---|---|---|
| Group | Mice | Test Article | | Drug Dose | | Sample Collection |
| 1 | 4 | PBS vehicle | | 10 | ml/kg | Tail nick at |
| 2 | 4 | apob-1 | 2:40:10 | 2 | mg/kg | Day 1, 2 & 3. |
| 3 | 3 | apob-1- | SNALP | | | Euth at Day 4 for |
| | | mismatch | | | | blood & liver. |

[0364] Body weights were measured daily, and cageside observations of animal behaviour and/or appearance were recorded daily. Animals were sacrificed on Day 4, 96 hours after administration of test article.

[0365] Animals were euthanized with a lethal dose of ketamine/xylazine and blood was collected via cardiac puncture prior to cervical dislocation. Blood was split in a lavendar EDTA microtainer (for plasma) and a SST microtainer (for serum). The liver was removed whole, weighed, and immersed in at least 5 volumes of RNAlater.

[0366] ApoB and GAPDH mRNA levels in liver were measured using a QuantiGene assay kit (Genospectra, USA) according to the manufacturer's instructions. ApoB protein levels in plasma and/or serum were measured using an ELISA method essentially as described by Zlot et al. (Journal of Lipid Research, 1999, 40:76-84). Total cholesterol in plasma and/or serum was measured using an enzymatic method according to manufacturer's instructions (Infinity Cholesterol, Thermo Electron Corp, USA).

[0367] As shown in FIG. 13, downregulation of ApoB mRNA in the liver was observed at 96 hours after a single injection of SNALP at a dosage of 2 mg/kg. Silencing of ApoB was expected to have additional biologicial consequences and these were measured in the form of lowered serum cholesterol levels (up to 59% decrease) and occurrence of fatty liver as detected by liver weight.

### Example 15

### In Vivo Silencing of ApoB Expression Following Intraperitoneal Administration of SNALP

[0368] A female Balb/c mouse model was used to demonstrate the efficacy of SNALP formulation administerered intraperitoneally.

[0369] A “2:40:10” (DSPC:Cholesterol:PEG-C-DMA:DLinDMA, 10:48:2:40% molar composition) SNALP formulation was prepared using a Direct Dilution process, at a nucleic acid to lipid ratio of 0.0195. SNALP containing either apob-1 or apob-1-mismatch siRNA were prepared at 0.2 mg siRNA/ml for administration.

[0370] The “apob-1” and “apob-1-mismatch” (also referred to as “mismatch”) siRNA sequences were as described in Example 6.

[0371] Balb/c mice (female, 4 weeks old) were obtained from Harlan Labs. After an acclimation period (of at least 7 days), animals were administered SNALP by intraperitoneal (IP) injection in the abdominal region once daily on Study Days 0, 1 & 2 (3 doses total per animal). Dosage was 2 mg siRNA per kg body weight, corresponding to 10 ml/kg (rounded to the nearest 10 microlitres). As a control, one group of animals was given an intravenous (IV) injection of PBS vehicle.

| | # | | | Dose | Day 4 |
|---|---|---|---|---|---|
| Group | Mice | Test Article | | Regime | Sacrifice |
| 1 | 4 | PBS vehicle | | IV Day 0 | Collect |
| 2 | 4 | apob-1 | 2:40:10 | IP Days 0, 1 & 2 | plasma |
| 3 | 3 | mismatch | SNALP | | & liver. |
| | | | 2 mg/kg | | |
| | | | per | | |
| | | | dose | | |

[0372] Body weights were measured daily, and cageside observations of animal behaviour and/or appearance were recorded daily. Animals were sacrificed on Day 4, 48 hours after the final administration of test article.

[0373] Animals were euthanized with a lethal dose of ketamine/xylazine and blood was collected via cardiac puncture prior to cervical dislocation. Blood was collected in lavendar EDTA microtainer and processed for plasma. The liver was removed whole, weighed, and immersed in at least 5 volumes of RNAlater.

[0374] ApoB and GAPDH mRNA levels in liver were measured using a QuantiGene assay kit (Genospectra, USA) according to the manufacturer's instructions. ApoB protein levels in plasma and/or serum were measured using an ELISA method essentially as described by Zlot et al. (Journal of Lipid Research, 1999, 40:76-84).

[0375] As shown in FIG. 14, downregulation of ApoB mRNA in the liver was observed at 48 hours after the third injection of SNALP and this downregulation effect was observed in both ApoB mRNA and ApoB protein. The use of a negative control treatment, consisting of SNALP containing siRNA that do not target the ApoB gene, demonstrates that the observed downregulation effect is specific to a formulation that contains siRNA designed to act against the target gene.

### Example 16

### In Vivo Silencing of ApoB Expression Following Subcutaneous Administration of SNALP

[0376] A female Balb/c mouse model was used to demonstrate the efficacy of SNALP administerered subcutaneously.

[0377] A “2:40:10” (DSPC:Cholesterol:PEG-C-DMA:DLinDMA, 10:48:2:40% molar composition) SNALP formulation was prepared using a Direct Dilution process, at a nucleic acid to lipid ratio of 0.0195. SNALP containing either apob-1 or apob-1-mismatch siRNA were prepared at either 0.1, 0.3 or 1.0 mg siRNA/ml for administration.

[0378] The “apob-1” and “apob-1-mismatch” (also referred to as “mismatch”) siRNA sequences were as described in Example 6, except that all uridine residues in each sense strand carried a 2′-O-methyl modification (referred to below as “UmodS”).

[0379] Balb/c mice (female, 4 weeks old) were obtained from Harlan Labs. After an acclimation period (of at least 7 days), animals were administered SNALP by subcutaneous (subQ) injection in the scapular region once on Study Day 0 (1 dose total per animal). Dosage was 1, 3 or 10 mg siRNA per kg body weight, corresponding to 10 ml/kg (rounded to the nearest 10 microlitres). As a control, one group of animals was given an intravenous (IV) injection of PBS vehicle.

| | # | | | Day 0 | Sample |
|---|---|---|---|---|---|
| Group | Mice | Test Article | | Dose | Collection |
| 1 | 4 | PBS vehicle | | IV 10 mL/kg | Euthanize on |
| 2 | 5 | 2:40:10 | apob-1 | subQ 1 mg/kg | Day 2. |
| | | Direct | UmodS | | Collect Liver. |
| 3 | 5 | Dilution | apob-1 | subQ 3 mg/kg | |
| | | | UmodS | | |
| 4 | 5 | SNALP | apob-1 | subQ 10 mg/kg | |
| | | | UmodS | | |
| 5 | 5 | | apob-1-MM | subQ 3 mg/kg | |
| | | | UmodS | | |

[0380] Body weights were measured daily, and cageside observations of animal behaviour and/or appearance were recorded daily. Animals were sacrificed on Day 2, 48 hours after administration of test article.

[0381] Animals were euthanized with a lethal dose of ketamine/xylazine and the liver was removed whole, weighed, and immersed in at least 5 volumes of RNAlater. ApoB and GAPDH mRNA levels in liver were measured using a QuantiGene assay kit (Genospectra, USA) according to the manufacturer's instructions.

[0382] As shown in FIG. 15, downregulation of ApoB mRNA in the liver was observed at 48 hours after a single injection of SNALP and this downregulation effect increased with the administration of greater dosages (up to 10 mg/kg). The use of a negative control treatment, consisting of SNALP containing siRNA that do not target the ApoB gene, demonstrates that the observed downregulation effect is specific to a formulation that contains siRNA designed to act against the target gene.

### Example 17

### In Vivo Silencing of ApoB Expression Using SNALP Encapsulating Anti-APoB siRNA

[0383] A female Balb/c mouse model was used to demonstrate the relative efficacy of a panel of SNALP encapsulating anti-ApoB siRNA.

[0384] A panel of siRNA sequences was generated by scanning the murine ApoB sequence (XM 137955) using the rules described in Example 1 above. Table 3 sets forth the sequence, position, and predicted immunostimulatory activity of each identified siRNA sequence.

TABLE 3

Immunostimulatory

| | | |
|---|---|---|
| Position | SiRNA target sequence | activity |

| | | |
|---|---|---|
| 1512 | GAAGAACCAUGGAACAAGU | High |
| 2688 | GCAUCAUCAUCCCAGACUU | Low |
| 10849 | CCAUCACUUUGACCAGGAA | Med |
| 12190 | GGAAUACGUUUCUUCAGAA | Med |
| 13395 | CCACAAGAUUGAUUGACCU | High |

[0385] A “2:40:10” (DSPC:Cholesterol:PEG-C-DMA:DLinDMA, 10:48:2:40% molar composition) SNALP formulation was prepared using a Direct Dilution process. SNALP containing the ApoB siRNA set forth in Table 4 were prepared at 0.2 mg siRNA/ml for administration. The “apob-1” and “apob-1-mismatch” (also referred to as “mismatch”) siRNA sequences were as described in Example 6. “Protiva apob-1” and “Protiva apob-1 mismatch” have the same sequences as the siRNA sequences described in Example 6, but were produced from different manufacturing lots. UmodS was as described in Example 16 above. The notation “no phosphate” indicates that the siRNA lacks a terminal phosphate.

[0386] Balb/c mice (female, 4 weeks old) were obtained from Harlan Labs. After an acclimation period (of at least 7 days), animals were administered SNALP by intravenous (IV) injection through the tail vein once daily on Study Day 0. Dosage was 2 mg siRNA per kg body weight, corresponding to 10 ml/kg (rounded to the nearest 10 microlitres). As a control, one group of animals was administered PBS vehicle.

| | # | | | Day 0 IV | Sample | Test Article Lot |
|---|---|---|---|---|---|---|
| Group | Mice | Test Article | | Drug Dose | Collection | No. |
| 1 | 4 | PBS vehicle | | 10 mL/kg | Hour 6 tail | N/A |
| 2 | 4 | apob-1 | :40:10 | 2 mg/kg | nick for | 242-072005-01 |
| 3 | 4 | apob-1 no phosphate | 1xD:L | | plasma. | 242-080405-06 |
| 4 | 4 | apob-1 U-mod-sense | NALP2 | | Hour 48 | 242-072505-01 |
| 5 | 4 | apoB-1514 (i.e., 1512) | | | collection of | 242-080405-01 |
| 6 | 4 | apoB-2690 (i.e., 2688) | | | liver in | 242-080405-02 |
| 7 | 4 | apoB-10851 (i.e., | | | RNA later | 242-080405-03 |
| | | 10849) | | | and | |
| 8 | 4 | apoB-12192 (i.e., | | | plasma. | 242-080405-04 |
| | | 12190) | | | | |
| 9 | 4 | apoB-13397 (i.e., | | | | 242-080405-05 |
| | | 13395) | | | | |
| 10 | 4 | apob-1-mismatch | | | | 233-061505-05 |
| 11 | 4 | Protiva apob-1 | | | | 242-080405-07 |
| 12 | 4 | Protiva apob-1 no | | | | 242-080405-08 |
| | | phosphate | | | | |

[0387] Body weights were measured daily, and cageside observations of animal behaviour and/or appearance were recorded daily. Animals were sacrificed on Day 3, 48 h after the single dose adminstration.

[0388] Animals were euthanized with a lethal dose of ketamine/xylazine and blood was collected via cardiac puncture prior to cervical dislocation. Blood was collected in a lavendar EDTA microtainer (for plasma). The liver was removed whole, weighed, and immersed in at least 5 volumes of RNAlater. Spleens were removed whole and weighed.

[0389] ApoB and GAPDH mRNA levels in liver were measured using a QuantiGene assay kit (Genospectra, USA) according to the manufacturer's instructions. ApoB protein levels in plasma and/or serum were measured using an ELISA method essentially as described by Zlot et al. (Journal of Lipid Research, 1999, 40:76-84). Total cholesterol in plasma and/or serum was measured using an enzymatic method according to manufacturer's instructions (Infinity Cholesterol, Thermo Electron Corp, USA). Interferon-alpha levels in plasma were measured using a sandwich ELISA method according to manufacturer's instructions (Mouse Interferon-α, PBL Biomedical, Piscataway, N.J.).

[0390] Silencing efficacy of newly designed apoB siRNA: As shown in FIGS. 16 and 17, downregulation of ApoB in the mouse was observed at the 2 mg/kg dosage at 48 hours after dosing. Downregulation of apoB by the newly designed siRNA was achieved to the greatest extent with apoB-12192 (liver mRNA—54% decrease, plasma protein—35% decrease). Silencing of ApoB was expected to have additional biologicial consequences and these were measured in the form of lowered serum cholesterol levels (15% decrease with apoB-12192).

[0391] Immunostimulatory activity of newly designed apoB siRNA: Scoring of the newly designed apoB siRNA for the presence or absence of putative immunostimulatory motifs indicated that an absence of any such motifs correlated with a lack of induction of interferon-α release at 6 h in mouse plasma (see, FIG. 18).

### Example 18

### In Vitro Silencing of ApoB Expression Using SNALP Encapsulating Anti-APoB siRNA

[0392] A panel of apoB siRNA were screened in vitro using HepG2 cells to assess their efficacy in silencing ApoB gene expression. Downregulation of secreted apoB protein was demonstrated with a number of these siRNA, at levels matching or exceeding that of apoB-1.

[0393] Candidate Apolipoprotein B sequences were identified using the methods set forth in Example 1 above, by scanning and mouse ApoB (XM_{—}137955) and human ApoB (NM_{—}000384) sequences to identify AA dinucleotide motifs and the 21 nucleotides 3′ of the motif. The sequences and their positions are set forth in Table 4 below.

TABLE 4

| | | |
|---|---|---|
| Mouse apoB | Human apoB | Sense 23 bp target sequence |

| | | |
|---|---|---|
| 327 | 428 | AA AGAGGUGUAUGGCUUCAAC CC |
| 328 | 429 | AA GAGGUGUAUGGCUUCAACC CU |
| 330 | 431 | GA GGUGUAUGGCUUCAACCCU GA |
| 1151 | 1252 | CA GCCCCAUCACUUUACAAGC CU |
| 1157 | 1258 | CA UCACUUUACAAGCCUUGGU UC |
| 1167 | 1268 | CA AGCCUUGGUUCAGUGUGGA CA |
| 1989 | 2090 | AA AAUAGAAGGGAAUCUUAUA UU |
| 1990 | 2091 | AA AUAGAAGGGAAUCUUAUAU UU |
| 1991 | 2092 | AA UAGAAGGGAAUCUUAUAUU UG |
| 1993 | 2094 | UA GAAGGGAAUCUUAUAUUUG AU |
| 1995 | 2096 | GA AGGGAAUCUUAUAUUUGAU CC |
| 1996 | 2097 | AA GGGAAUCUUAUAUUUGAUC CA |
| 2727 | 2828 | CA GAUGAACACCAACUUCUUC CA |
| 2732 | 2833 | GA ACACCAACUUCUUCCACGA GU |
| 2733 | 2834 | AA CACCAACUUCUUCCACGAG UC |
| 3473 | 3574 | AA UGGACUCAUCUGCUACAGC UU |
| 3475 | 3576 | AA AUGGACUCAUCUGCUACAG CU |
| 3998 | 4099 | CA AGUCUGUGGGAUUCCAUCU GC |
| 3999 | 4100 | AA GUCUGUGGGAUUCCAUCUG CC |
| 4242 | 4343 | CA AGGAUCUGGAGAAACAACA UA |
| 4243 | 4344 | AA GGAUCUGGAGAAACAACAU AU |
| 4246 | 4347 | GA UCUGGAGAAACAACAUAUG AC |
| 6560 | 6664 | GA UACAAUUUGAUCAGUAUAU UA |
| 6564 | 6668 | CA AUUUGAUCAGUAUAUUAAA GA |
| 6565 | 6669 | AA UUUGAUCAGUAUAUUAAAG AU |
| 9098 | 9217 | UA UUGGAACUUUGAAAAAUUC UC |
| 10048 | 10164 | CA AGUGUCAUCACACUGAAUA CC |
| 10049 | 10165 | AA GUGUCAUCACACUGAAUAC CA |
| 10055 | 10171 | CA UCACACUGAAUACCAAUGC UG |
| 10346 | 10462 | UA AUGGAAAUACCAAGUCAAA AC |
| 10347 | 10463 | AA UGGAAAUACCAAGUCAAAA AC |
| 10886 | 11002 | UA ACACUAAGAACCAGAAGAU CA |
| 12093 | 12299 | AA UUGGGAAGAAGAGGCAGCU UC |

[0394] HepG2 cells (human hepatocellular carcinoma) were transfected with the murine siRNA sequences using Lipofectamine 2000 (Invitrogen) at a 100 nM dosage at the following ratios: 70 pmol siRNA:1 uL lipofectamine and 20 pmol siRNA:1 uL lipofectamine. Cells were plated on day 0, transfected with complexes on day 1, media was replaced with fresh media on day 2 and supernatants and cells were harvested on day 3 (48 h after transfection).

[0395] ApoB expression was measured by assaying the supernatants of transfected HepG2 cells for secreted apoB protein using an ELISA method essentially as described by Soutschek et al. (Nature, 2004, 432:173-78). Cell lysates were assayed for total protein using the BCA assay (BCA Micro Kit, Pierce). ApoB levels in HepG2 supernatants were normalized to total protein levels.

[0396] As shown in FIG. 19, downregulation of ApoB in HepG2 cells was observed at the 100 nM dosage at both transfection ratios. Downregulation of apoB by the newly designed siRNA was achieved with a number of the newly designed siRNA at levels matching or exceeding that of apoB-1. These include apob-10048, apob-10049, apob-10346 and apob-10884.

[0397] It is to be understood that the above description is intended to be illustrative and not restrictive. Many embodiments will be apparent to those of skill in the art upon reading the above description. The scope of the invention should, therefore, be determined not with reference to the above description, but should instead be determined with reference to the appended claims, along with the full scope of equivalents to which such claims are entitled. The disclosures of all articles and references, including patent applications, patents, PCT publications, and Accession Nos. are incorporated herein by reference for all purposes.

What is claimed is:

1. A nucleic acid lipid particle comprising:
an siRNA molecule that silences Apolipoprotein B (ApoB) expression;
a cationic lipid; and
a non-cationic lipid.

2. The nucleic acid-lipid particle in accordance with claim 1, wherein said nucleic acid-lipid particle comprises an siRNA molecule comprising a sequence set forth in Table 1, rows A-F of Table 2, and Tables 3-7.

3. The nucleic acid-lipid particle in accordance with claim 1, wherein said nucleic acid-particle comprises at least two siRNA molecules, wherein each siRNA molecule comprises a sequence independently selected from the sequences set forth in Table 1, rows A-F of Table 2, and Tables 3-7.

4. The nucleic acid-lipid particle in accordance with claim 1, wherein the siRNA silences ApoB expression by at least about 2 fold more than an siRNA that is not in a nucleic acid-lipid particle.

5. The nucleic acid-lipid particle in accordance with claim 1, wherein the siRNA silences ApoB expression by at least about 5 fold more than an siRNA that is not in a nucleic acid-lipid particle.

6. The nucleic acid-lipid particle in accordance with claim 1, wherein said cationic lipid is a member selected from the group consisting of N,N-dioleyl-N,N-dimethylammonium chloride (DODAC), N,N-distearyl-N,N-dimethylammonium bromide (DDAB), N-(1-(2,3-dioleoyloxy)propyl)-N,N,N-trimethylammonium chloride (DOTAP), N-(1-(2,3-dioleyloxy)propyl)-N,N,N-trimethylammonium chloride (DOTMA), and N,N-dimethyl-2,3-dioleyloxy)propylamine (DODMA), 1,2-DiLinoleyloxy-N,N-dimethylaminopropane (DLinDMA), 1,2-Dilinolenyloxy-N,N-dimethylaminopropane (DLendMA), and a mixture thereof.

7. The nucleic acid-lipid particle in accordance with claim 1, wherein said cationic lipid is DLinDMA.

8. The nucleic acid-lipid particle in accordance with claim 1, wherein said non-cationic lipid is an anionic lipid.

9. The nucleic acid-lipid particle in accordance with claim 1, wherein said non-cationic lipid is a neutral lipid.

10. The nucleic acid-lipid particle in accordance with claim 1, wherein said non-cationic lipid is a member selected from the group consisting of dioleoylphosphatidylethanolamine (DOPE), palmitoyloleoylphosphatidylcholine (POPC), egg phosphatidylcholine (EPC), distearoylphosphatidylcholine (DSPC), palmitoyloleyolphosphatidylglycerol (POPG), dipalmitoyl phosphatidyl ethanolamine (DPPE), dimyristoylphosphoethanolamine (DMPE), distearoyl-phosphatidyl-ethanolamine (DSPE), 16-O-monomethyl PE, 16-O-dimethyl PE, 18-1-trans PE, palmitoyloleoylphosphatidylethanolamine (POPE), 1-stearoyl-2-oleoyl-phosphatidyethanolamine (SOPE), cholesterol, and a mixture thereof.

11. The nucleic acid-lipid particle in accordance with claim 1, wherein said non-cationic lipid is DSPC.

12. The nucleic acid-lipid particle in accordance with claim 1, further comprising a conjugated lipid that inhibits aggregation of particles

13. The nucleic acid-lipid particle in accordance with claim 12, wherein the conjugated lipid that inhibits aggregation of particles is a member selected from the group consisting of: a polyethyleneglycol (PEG)-lipid conjugate, a polyamide (ATTA)-lipid conjugate, and a mixture thereof.

14. The nucleic acid-lipid particle in accordance with claim 13, wherein the PEG-lipid conjugate is member selected from the group consisting of: a PEG-diacylglycerol (PEG-DAG), a PEG dialkyloxypropyl (PEG-DAA), a PEG-phospholipid, a PEG-ceramide (PEG-Cer), and a mixture thereof.

15. The nucleic acid-lipid particle in accordance with claim 13, wherein the conjugated lipid that inhibits aggregation of particles comprises a PEG-DAA conjugate.

16. The nucleic acid-lipid particle in accordance with claim 15, wherein the PEG-DAA conjugate is a member selected from the group consisting of a PEG-dilauryloxypropyl (C₁₂), a PEG-dimyristyloxypropyl (C₁₄), a PEG-dipalmityloxypropyl (C₁₆), and a PEG-distearyloxypropyl (C₁₈).

17. The nucleic acid-lipid particle in accordance with claim 15, wherein said PEG-DAA conjugate is a PEG-dimyristyloxypropyl (C₁₄).

18. The nucleic acid-lipid particle in accordance with claim 1, wherein said cationic lipid comprises from about 5 mol % to about 15 mol % of the total lipid present in said particle.

19. The nucleic acid-lipid particle in accordance with claim 1, wherein said cationic lipid comprises from about 30 mol % to about 50 mol % of the total lipid present in said particle.

20. The nucleic acid-lipid particle in accordance with claim 1, wherein said cationic lipid comprises from about 30 mol % to about 50 mol % of the total lipid present in said particle.

21. The nucleic acid-lipid particle in accordance with claim 1, wherein said cationic lipid comprises about 40 mol % of the total lipid present in said particle.

22. The nucleic acid-lipid particle in accordance with claim 1, wherein said non-cationic lipid comprises from about 5 mol % to about 90 mol % of the total lipid present in said particle.

23. The nucleic acid-lipid particle in accordance with claim 1, wherein said non-cationic lipid comprises from about 20 mol % to about 85 mol % of the total lipid present in said particle.

24. The nucleic acid-lipid particle in accordance with claim 15, wherein said PEG-DAA conjugate comprises from 0.5 mol % to about 20 mol % of the total lipid present in said particle.

25. The nucleic acid-lipid particle in accordance with claim 15, wherein said PEG-DAA conjugate comprises from 2 mol % to about 15 mol % of the total lipid present in said particle.

26. The nucleic acid-lipid particle in accordance with claim 15, wherein said PEG-DAA conjugate comprises about 2 mol % of the total lipid present in said particle.

27. The nucleic acid-lipid particle in accordance with claim 1, further comprising cholesterol.

28. The nucleic acid-lipid particle in accordance with claim 27, wherein the cholesterol comprises from about 0 mol % to about 10 mol % of the total lipid present in said particle.

29. The nucleic acid-lipid particle in accordance with claim 27, wherein the cholesterol comprises from about 10 mol % to about 60 mol % of the total lipid present in said particle.

30. The nucleic acid-lipid particle in accordance with claim 27, wherein the cholesterol comprises from about 20 mol % to about 45 mol % of the total lipid present in said particle.

31. The nucleic acid-lipid particle in accordance with claim 1, wherein the nucleic acid in said nucleic acid-lipid particle is not substantially degraded after exposure of said particle to a nuclease at 37° C. for 20 minutes.

32. The nucleic acid-lipid particle in accordance with claim 1, wherein the nucleic acid in said nucleic acid-lipid particle is not substantially degraded after incubation of said particle in serum at 37° C. for 30 minutes.

33. The nucleic acid-lipid particle in accordance with claim 1, wherein the nucleic acid is fully encapsulated in said nucleic acid-lipid particle.

34. The nucleic acid-lipid particle in accordance with claim 1, wherein said particle has a nucleic acid:lipid ratio (mg:mg) of from about 0.01 to about 0.2.

35. The nucleic acid-lipid particle in accordance with claim 1, wherein said particle has a nucleic acid:lipid ratio (mg:mg) of from about 0.02 to about 0.1.

36. The nucleic acid-lipid particle in accordance with claim 1, wherein said particle has a nucleic acid:lipid ratio (mg:mg) of about 0.04.

37. The nucleic acid-lipid particle in accordance with claim 1, wherein wherein said particle has a median diameter of less than about 150 nm.

38. The nucleic acid-lipid particle in accordance with claim 1, wherein wherein said particle has a median diameter of less than about 100 nm.

39. A pharmaceutical composition comprising a nucleic acid-lipid particle in accordance with claim 1 and a pharmaceutically acceptable carrier.

40. A method of introducing an siRNA that silences ApoB expression into a cell, said method comprising contacting said cell with a nucleic acid-lipid particle comprising a cationic lipid, a non-cationic lipid, and said siRNA.

41. The method of claim 40, wherein said nucleic acid-lipid particle further comprises a conjugated lipid that inhibits aggregation of particles.

42. The method of claim 40, wherein said nucleic acid-lipid particle comprises an siRNA molecule comprising any one of the sequences set forth in Table 1, rows A-F of Table 2, and Tables 3-7.

43. The method of claim 40, wherein said nucleic acid-lipid particle comprises at least two siRNA molecules, wherein each siRNA molecule comprises a sequence independently selected from the sequences set forth in Table 1, rows A-F of Table 2, and Tables 3-7.

44. The method of claim 40, wherein said siRNA in said nucleic acid-lipid particle is resistant in aqueous solution to degradation with a nuclease.

45. The method of claim 40, wherein said cationic lipid is a member selected from the group consisting of DODAC, DDAB, DOTAP, DOTMA, DODMA, DLinDMA, DLenDMA, and a mixture thereof.

46. The method of claim 40, wherein said non-cationic lipid is a member selected from the group consisting of DOPE, POPC, EPC, DSPC, POPG, DPPE, DMPE, DSPE, 16-O-monomethyl PE, 16-O-dimethyl PE, 18-1-trans PE, POPE, SOPE, cholesterol, and a mixture thereof.

47. The method of claim 40, wherein the conjugated lipid that inhibits aggregation of particles comprises a PEG-lipid conjugate selected from the group consisting of: a PEG-DAG, a PEG-DAA, a PEG-phospholipid, a PEG-Cer, and a mixture thereof.

48. The method of claim 40, wherein said cell is in a mammal.

49. The method of claim 48, wherein said contacting comprises administering said nucleic acid-lipid particle via a route selected from the group consisting of: intravenous, subcutaneous, and intraperitoneal.

50. The method of claim 48, wherein the mammal is a human.

51. The method of claim 50, wherein said human has a disease or disorder associated with expression of a ApoB and wherein expression of ApoB is silenced by said siRNA.

52. The method of claim 50, wherein said disease or disorder is associated with overexpression of ApoB and wherein expression of ApoB is silenced by said siRNA.

53. The method of claim 50, wherein said human has a disease or disorder selected from the group consisting of: atherosclerosis, angina pectoris, high blood pressure, diabetes, and hypothyroidism.

54. The method of claim 50, wherein said human has a disease or disorder involving hypercholesterolemia and wherein serum cholesterol levels are lowered when expression of ApoB is silenced by said siRNA.

55. The method of claim 54, wherein said disease is a member selected from the group consisting of: atherosclerosis, angina pectoris, and high blood pressure.

56. An isolated nucleic acid comprising a sequence set forth in in Table 1, rows A-F of Table 2, and Tables 3-7.

The application's sequence listing, which the Patent Office published only in electronic form, follows.

SEQUENCE LISTING (14212 sequences)

SEQ ID NO: 1 - DNA, 14121 bp, Homo sapiens
  misc_feature (1)...(14121): human apolipoprotein B (ApoB)
attcccaccgggacctgcggggctgagtgcccttctcggttgctgccgctgaggagcccgcccagccagccagggccgcgaggccgaggccaggccgcagcccaggagccgccccaccgcagctggcgatggacccgccgaggcccgcgctgctggcgctgctggcgctgcctgcgctgctgctgctgctgctggcgggcgccagggccgaagaggaaatgctggaaaatgtcagcctggtctgtccaaaagatgcgacccgattcaagcacctccggaagtacacatacaactatgaggctgagagttccagtggagtccctgggactgctgattcaagaagtgccaccaggatcaactgcaaggttgagctggaggttccccagctctgcagcttcatcctgaagaccagccagtgcaccctgaaagaggtgtatggcttcaaccctgagggcaaagccttgctgaagaaaaccaagaactctgaggagtttgctgcagccatgtccaggtatgagctcaagctggccattccagaagggaagcaggttttcctttacccggagaaagatgaacctacttacatcctgaacatcaagaggggcatcatttctgccctcctggttcccccagagacagaagaagccaagcaagtgttgtttctggataccgtgtatggaaactgctccactcactttaccgtcaagacgaggaagggcaatgtggcaacagaaatatccactgaaagagacctggggcagtgtgatcgcttcaagcccatccgcacaggcatcagcccacttgctctcatcaaaggcatgacccgccccttgtcaactctgatcagcagcagccagtcctgtcagtacacactggacgctaagaggaagcatgtggcagaagccatctgcaaggagcaacacctcttcctgcctttctcctacaacaataagtatgggatggtagcacaagtgacacagactttgaaacttgaagacacaccaaagatcaacagccgcttctttggtgaaggtactaagaagatgggcctcgcatttgagagcaccaaatccacatcacctccaaagcaggccgaagctgttttgaagactctccaggaactgaaaaaactaaccatctctgagcaaaatatccagagagctaatctcttcaataagctggttactgagctgagaggcctcagtgatgaagcagtcacatctctcttgccacagctgattgaggtgtccagccccatcactttacaagccttggttcagtgtggacagcctcagtgctccactcacatcctccagtggctgaaacgtgtgcatgccaacccccttctgatagatgtggtcacctacctggtggccctgatccccgagccctcagcacagcagctgcgagagatcttcaacatggcgagggatcagcgcagccgagccaccttgtatgcgctgagccacgcggtcaacaactatcataagacaaaccctacagggacccaggagctgctggacattgctaattacctgatggaacagattcaagatgactgcactggggatgaagattacacctatttgattctgcgggtcattggaaatatgggccaaaccatggagcagttaactccagaactcaagtcttcaatcctcaaatgtgtccaaagtacaaagccatcactgatgatccagaaagctgccatccaggctctgcggaaaatggagcctaaagacaaggaccaggaggttcttcttcagactttccttgatgatgcttctccgggagataagcgactggctgcctatcttatgttgatgaggagtccttcacaggcagatattaacaaaattgtccaaattctaccatgggaacagaatgagcaagtgaagaactttgtggcttcccatattgccaatatcttgaactcagaagaattggatatccaagatctgaaaaagttagtgaaagaagctctgaaagaatctcaacttccaactgtcatggacttcagaaaattctctcggaactatcaactctacaaatctgtttctcttccatcacttgacccagcctcagccaaaatagaagggaatcttatatttgatccaaataactaccttcctaaagaaagcatgctgaaaactaccctcactgcctttggatttgcttcagctgacctcatcgagattggcttggaaggaaaaggctttgagccaacattggaagctctttttgggaagcaaggatttttcccagacagtgtcaacaaagctttgtactgggttaatggtcaagttcctgatggtgtctctaaggtcttagtggaccactttggctataccaaagatgataaacatgagcaggatatggtaaatggaataatgctcagtgttgagaagctgattaaagatttgaaatccaaagaagtcccggaagccagagcctacctccgcatcttgggagaggagcttggttttgccagtctccatgacctccagctcctgggaaagctgcttctgatgggtgcccgcactctgcaggggatcccccagatgattggagaggtcatcaggaagggctcaaagaatgacttttttcttcactacatcttcatggagaatgcctttgaactccccactggagctggattacagttgcaaatatcttcatctggagtcattgctcccggagccaaggctggagtaaaactggaagtagccaacatgcaggctgaactggtggcaaaaccctccgtgtctgtggagtttgtgacaaatatgggcatcatcattccggacttcgctaggagtggggtccagatgaacaccaacttcttccacgagtcgggtctggaggctcatgttgccctaaaagctgggaagctgaagtttatcattccttccccaaagagaccagtcaagctgctcagtggaggcaacacattacatttggtctctaccaccaaaacggaggtgatcccacctctcattgagaacaggcagtcctggtcagtttgcaagcaagtctttcctggcctgaattactgcacctcaggcgcttactccaacgccagctccacagactccgcctcctactatccgctgaccggggacaccagattagagctggaactgaggcctacaggagagattgagcagtattctgtcagcgcaacctatgagctccagagagaggacagagccttggtggataccctgaagtttgtaactcaagcagaaggtgcgaagcagactgaggctaccatgacattcaaatataatcggcagagtatgaccttgtccagtgaagtccaaattccggattttgatgttgacctcggaacaatcctcagagttaatgatgaatctactgagggcaaaacgtcttacagactcaccctggacattcagaacaagaaaattactgaggtcgccctcatgggccacctaagttgtgacacaaaggaagaaagaaaaatcaagggtgttatttccataccccgtttgcaagcagaagccagaagtgagatcctcgcccactggtcgcctgccaaactgcttctccaaatggactcatctgctacagcttatggctccacagtttccaagagggtggcatggcattatgatgaagagaagattgaatttgaatggaacacaggcaccaatgtagataccaaaaaaatgacttccaatttccctgtggatctctccgattatcctaagagcttgcatatgtatgctaatagactcctggatcacagagtccctgaaacagacatgactttccggcacgtgggttccaaattaatagttgcaatgagctcatggcttcagaaggcatctgggagtcttccttatacccagactttgcaagaccacctcaatagcctgaaggagttcaacctccagaacatgggattgccagacttccacatcccagaaaacctcttcttaaaaagcgatggccgggtcaaatataccttgaacaagaacagtttgaaaattgagattcctttgccttttggtggcaaatcctccagagatctaaagatgttagagactgttaggacaccagccctccacttcaagtctgtgggattccatctgccatctcgagagttccaagtccctacttttaccattcccaagttgtatcaactgcaagtgcctctcctgggtgttctagacctctccacgaatgtctacagcaacttgtacaactggtccgcctcctacagtggtggcaacaccagcacagaccatttcagccttcgggctcgttaccacatgaaggctgactctgtggttgacctgctttcctacaatgtgcaaggatctggagaaacaacatatgaccacaagaatacgttcacactatcatgtgatgggtctctacgccacaaatttctagattcgaatatcaaattcagtcatgtagaaaaacttggaaacaacccagtctcaaaaggtttactaatattcgatgcatctagttcctggggaccacagatgtctgcttcagttcatttggactccaaaaagaaacagcatttgtttgtcaaagaagtcaagattgatgggcagttcagagtctcttcgttctatgctaaaggcacatatggcctgtcttgtcagagggatcctaacactggccggctcaatggagagtccaacctgaggtttaactcctcctacctccaaggcaccaaccagataacaggaagatatgaagatggaaccctctccctcacctccacctctgatctgcaaagtggcatcattaaaaatactgcttccctaaagtatgagaactacgagctgactttaaaatctgacaccaatgggaagtataagaactttgccacttctaacaagatggatatgaccttctctaagcaaaatgcactgctgcgttctgaatatcaggctgattacgagtcattgaggttcttcagcctgctttctggatcactaaattcccatggtcttgagttaaatgctgacatcttaggcactgacaaaattaatagtggtgctcacaaggcgacactaaggattggccaagatggaatatctaccagtgcaacgaccaacttgaagtgtagtctcctggtgctggagaatgagctgaatgcagagcttggcctctctggggcatctatgaaattaacaacaaatggccgcttcagggaacacaatgcaaaattcagtctggatgggaaagccgccctcacagagctatcactgggaagtgcttatcaggccatgattctgggtgtcgacagcaaaaacattttcaacttcaaggtcagtcaagaaggacttaagctctcaaatgacatgatgggctcatatgctgaaatgaaatttgaccacacaaacagtctgaacattgcaggcttatcactggacttctcttcaaaacttgacaacatttacagctctgacaagttttataagcaaactgttaatttacagctacagccctattctctggtaactactttaaacagtgacctgaaatacaatgctctggatctcaccaacaatgggaaactacggctagaacccctgaagctgcatgtggctggtaacctaaaaggagcctaccaaaataatgaaataaaacacatctatgccatctcttctgctgccttatcagcaagctataaagcagacactgttgctaaggttcagggtgtggagtttagccatcggctcaacacagacatcgctgggctggcttcagccattgacatgagcacaaactataattcagactcactgcatttcagcaatgtcttccgttctgtaatggccccgtttaccatgaccatcgatgcacatacaaatggcaatgggaaactcgctctctggggagaacatactgggcagctgtatagcaaattcctgttgaaagcagaacctctggcatttactttctctcatgattacaaaggctccacaagtcatcatctcgtgtctaggaaaagcatcagtgcagctcttgaacacaaagtcagtgccctgcttactccagctgagcagacaggcacctggaaactcaagacccaatttaacaacaatgaatacagccaggacttggatgcttacaacactaaagataaaattggcgtggagcttactggacgaactctggctgacctaactctactagactccccaattaaagtgccacttttactcagtgagcccatcaatatcattgatgctttagagatgagagatgccgttgagaagccccaagaatttacaattgttgcttttgtaaagtatgataaaaaccaagatgttcactccattaacctcccattttttgagaccttgcaagaatattttgagaggaatcgacaaaccattatagttgtagtggaaaacgtacagagaaacctgaagcacatcaatattgatcaatttgtaagaaaatacagagcagccctgggaaaactcccacagcaagctaatgattatctgaattcattcaattgggagagacaagtttcacatgccaaggagaaactgactgctctcacaaaaaagtatagaattacagaaaatgatatacaaattgcattagatgatgccaaaatcaactttaatgaaaaactatctcaactgcagacatatatgatacaatttgatcagtatattaaagatagttatgatttacatgatttgaaaatagctattgctaatattattgatgaaatcattgaaaaattaaaaagtcttgatgagcactatcatatccgtgtaaatttagtaaaaacaatccatgatctacatttgtttattgaaaatattgattttaacaaaagtggaagtagtactgcatcctggattcaaaatgtggatactaagtaccaaatcagaatccagatacaagaaaaactgcagcagcttaagagacacatacagaatatagacatccagcacctagctggaaagttaaaacaacacattgaggctattgatgttagagtgcttttagatcaattgggaactacaatttcatttgaaagaataaatgatgttcttgagcatgtcaaacactttgttataaatcttattggggattttgaagtagctgagaaaatcaatgccttcagagccaaagtccatgagttaatcgagaggtatgaagtagaccaacaaatccaggttttaatggataaattagtagagttgacccaccaatacaagttgaaggagactattcagaagctaagcaatgtcctacaacaagttaagataaaagattactttgagaaattggttggatttattgatgatgctgtgaagaagcttaatgaattatcttttaaaacattcattgaagatgttaacaaattccttgacatgttgataaagaaattaaagtcatttgattaccaccagtttgtagatgaaaccaatgacaaaatccgtgaggtgactcagagactcaatggtgaaattcaggctctggaactaccacaaaaagctgaagcattaaaactgtttttagaggaaaccaaggccacagttgcagtgtatctggaaagcctacaggacaccaaaataaccttaatcatcaattggttacaggaggctttaagttcagcatctttggctcacatgaaggccaaattccgagagactctagaagatacacgagaccgaatgtatcaaatggacattcagcaggaacttcaacgatacctgtctctggtaggccaggtttatagcacacttgtcacctacatttctgattggtggactcttgctgctaagaaccttactgactttgcagagcaatattctatccaagattgggctaaacgtatgaaagcattggtagagcaagggttcactgttcctgaaatcaagaccatccttgggaccatgcctgcctttgaagtcagtcttcaggctcttcagaaagctaccttccagacacctgattttatagtccccctaacagatttgaggattccatcagttcagataaacttcaaagacttaaaaaatataaaaatcccatccaggttttccacaccagaatttaccatccttaacaccttccacattccttcctttacaattgactttgtcgaaatgaaagtaaagatcatcagaaccattgaccagatgcagaacagtgagctgcagtggcccgttccagatatatatctcagggatctgaaggtggaggacattcctctagcgagaatcaccctgccagacttccgtttaccagaaatcgcaattccagaattcataatcccaactctcaaccttaatgattttcaagttcctgaccttcacataccagaattccagcttccccacatctcacacacaattgaagtacctacttttggcaagctatacagtattctgaaaatccaatctcctcttttcacattagatgcaaatgctgacatagggaatggaaccacctcagcaaacgaagcaggtatcgcagcttccatcactgccaaaggagagtccaaattagaagttctcaattttgattttcaagcaaatgcacaactctcaaaccctaagattaatccgctggctctgaaggagtcagtgaagttctccagcaagtacctgagaacggagcatgggagtgaaatgctgttttttggaaatgctattgagggaaaatcaaacacagtggcaagtttacacacagaaaaaaatacactggagcttagtaatggagtgattgtcaagataaacaatcagcttaccctggatagcaacactaaatacttccacaaattgaacatccccaaactggacttctctagtcaggctgacctgcgcaacgagatcaagacactgttgaaagctggccacatagcatggacttcttctggaaaagggtcatggaaatgggcctgccccagattctcagatgagggaacacatgaatcacaaattagtttcaccatagaaggacccctcacttcctttggactgtccaataagatcaatagcaaacacctaagagtaaaccaaaacttggtttatgaatctggctccctcaacttttctaaacttgaaattcaatcacaagtcgattcccagcatgtgggccacagtgttctaactgctaaaggcatggcactgtttggagaagggaaggcagagtttactgggaggcatgatgctcatttaaatggaaaggttattggaactttgaaaaattctcttttcttttcagcccagccatttgagatcacggcatccacaaacaatgaagggaatttgaaagttcgttttccattaaggttaacagggaagatagacttcctgaataactatgcactgtttctgagtcccagtgcccagcaagcaagttggcaagtaagtgctaggttcaatcagtataagtacaaccaaaatttctctgctggaaacaacgagaacattatggaggcccatgtaggaataaatggagaagcaaatctggatttcttaaacattcctttaacaattcctgaaatgcgtctaccttacacaataatcacaactcctccactgaaagatttctctctatgggaaaaaacaggcttgaaggaattcttgaaaacgacaaagcaatcatttgatttaagtgtaaaagctcagtataagaaaaacaaacacaggcattccatcacaaatcctttggctgtgctttgtgagtttatcagtcagagcatcaaatcctttgacaggcattttgaaaaaaacagaaacaatgcattagattttgtcaccaaatcctataatgaaacaaaaattaagtttgataagtacaaagctgaaaaatctcacgacgagctccccaggacctttcaaattcctggatacactgttccagttgtcaatgttgaagtgtctccattcaccatagagatgtcggcattcggctatgtgttcccaaaagcagtcagcatgcctagtttctccatcctaggttctgacgtccgtgtgccttcatacacattaatcctgccatcattagagctgccagtccttcatgtccctagaaatctcaagctttctcttccacatttcaaggaattgtgtaccataagccatatttttattcctgccatgggcaatattacctatgatttctcctttaaatcaagtgtcatcacactgaataccaatgctgaactttttaaccagtcagatattgttgctcatctcctttcttcatcttcatctgtcattgatgcactgcagtacaaattagagggcaccacaagattgacaagaaaaaggggattgaagttagccacagctctgtctctgagcaacaaatttgtggagggtagtcataacagtactgtgagcttaaccacgaaaaatatggaagtgtcagtggcaaaaaccacaaaagccgaaattccaattttgagaatgaatttcaagcaagaacttaatggaaataccaagtcaaaacctactgtctcttcctccatggaatttaagtatgatttcaattcttcaatgctgtactctaccgctaaaggagcagttgaccacaagcttagcttggaaagcctcacctcttacttttccattgagtcatctaccaaaggagatgtcaagggttcggttctttctcgggaatattcaggaactattgctagtgaggccaacacttacttgaattccaagagcacacggtcttcagtgaagctgcagggcacttccaaaattgatgatatctggaaccttgaagtaaaagaaaattttgctggagaagccacactccaacgcatatattccctctgggagcacagtacgaaaaaccacttacagctagagggcctctttttcaccaacggagaacatacaagcaaagccaccctggaactctctccatggcaaatgtcagctcttgttcaggtccatgcaagtcagcccagttccttccatgatttccctgaccttggccaggaagtggccctgaatgctaacactaagaaccagaagatcagatggaaaaatgaagtccggattcattctgggtctttccagagccaggtcgagctttccaatgaccaagaaaaggcacaccttgacattgcaggatccttagaaggacacctaaggttcctcaaaaatatcatcctaccagtctatgacaagagcttatgggatttcctaaagctggatgtaaccaccagcattggtaggagacagcatcttcgtgtttcaactgcctttgtgtacaccaaaaaccccaatggctattcattctccatccctgtaaaagttttggctgataaattcattactcctgggctgaaactaaatgatctaaattcagttcttgtcatgcctacgttccatgtcccatttacagatcttcaggttccatcgtgcaaacttgacttcagagaaatacaaatctataagaagctgagaacttcatcatttgccctcaacctaccaacactccccgaggtaaaattccctgaagttgatgtgttaacaaaatattctcaaccagaagactccttgattcccttttttgagataaccgtgcctgaatctcagttaactgtgtcccagttcacgcttccaaaaagtgtttcagatggcattgctgctttggatctaaatgcagtagccaacaagatcgcagactttgagttgcccaccatcatcgtgcctgagcagaccattgagattccctccattaagttctctgtacctgctggaattgtcattccttcctttcaagcactgactgcacgctttgaggtagactctcccgtgtataatgccacttggagtgccagtttgaaaaacaaagcagattatgttgaaacagtcctggattccacatgcagctcaaccgtacagttcctagaatatgaactaaatgttttgggaacacacaaaatcgaagatggtacgttagcctctaagactaaaggaacacttgcacaccgtgacttcagtgcagaatatgaagaagatggcaaatttgaaggacttcaggaatgggaaggaaaagcgcacctcaatatcaaaagcccagcgttcaccgatctccatctgcgctaccagaaagacaagaaaggcatctccacctcagcagcctccccagccgtaggcaccgtgggcatggatatggatgaagatgacgacttttctaaatggaacttctactacagccctcagtcctctccagataaaaaactcaccatattcaaaactgagttgagggtccgggaatctgatgaggaaactcagatcaaagttaattgggaagaagaggcagcttctggcttgctaacctctctgaaagacaacgtgcccaaggccacaggggtcctttatgattatgtcaacaagtaccactgggaacacacagggctcaccctgagagaagtgtcttcaaagctgagaagaaatctgcagaacaatgctgagtgggtttatcaaggggccattaggcaaattgatgatatcgacgtgaggttccagaaagcagccagtggcaccactgggacctaccaagagtggaaggacaaggcccagaatctgtaccaggaactgttgactcaggaaggccaagccagtttccagggactcaaggataacgtgtttgatggcttggtacgagttactcaaaaattccatatgaaagtcaagcatctgattgactcactcattgattttctgaacttccccagattccagtttccggggaaacctgggatatacactagggaggaactttgcactatgttcataagggaggtagggacggtactgtcccaggtatattcgaaagtccataatggttcagaaatactgttttcctatttccaagacctagtgattacacttcctttcgagttaaggaaacataaactaatagatgtaatctcgatgtatagggaactgttgaaagatttatcaaaagaagcccaagaggtatttaaagccattcagtctctcaagaccacagaggtgctacgtaatcttcaggaccttttacaattcattttccaactaatagaagataacattaaacagctgaaagagatgaaatttacttatcttattaattatatccaagatgagatcaacacaatcttcaatgattatatcccatatgtttttaaattgttgaaagaaaacctatgccttaatcttcataagttcaatgaatttattcaaaacgagcttcaggaagcttctcaagagttacagcagatccatcaatacattatggcccttcgtgaagaatattttgatccaagtatagttggctggacagtgaaatattatgaacttgaagaaaagatagtcagtctgatcaagaacctgttagttgctcttaaggacttccattctgaatatattgtcagtgcctctaactttacttcccaactctcaagtcaagttgagcaatttctgcacagaaatattcaggaatatcttagcatccttaccgatccagatggaaaagggaaagagaagattgcagagctttctgccactgctcaggaaataattaaaagccaggccattgcgacgaagaaaataatttctgattaccaccagcagtttagatataaactgcaagatttttcagaccaactctctgattactatgaaaaatttattgctgaatccaaaagattgattgacctgtccattcaaaactaccacacatttctgatatacatcacggagttactgaaaaagctgcaatcaaccacagtcatgaacccctacatgaagcttgctccaggagaacttactatcatcctctaattttttaaaagaaatcttcatttattcttcttttccaattgaactttcacatagcacagaaaaaattcaaactgcctatattgataaaaccatacagtgagccagccttgcagtaggcagtagactataagcagaagcacatatgaactggacctgcaccaaagctggcaccagggctcggaaggtctctgaactcagaaggatggcattttttgcaagttaaagaaaatcaggatctgagttattttgctaaacttgggggaggaggaacaaataaatggagtctttattgtgtatcata

SEQ ID NO: 2 - RNA, 19 nt, Artificial Sequence
  ApoB-148 siRNA identifier A target sequence sense strand
gaagaugcaacucgauuca

SEQ ID NO: 3 - RNA, 19 nt, Artificial Sequence
  ApoB-911 siRNA identifier B target sequence sense strand
acagucgcuucuucaguga

SEQ ID NO: 4 - RNA, 19 nt, Artificial Sequence
  ApoB-1455 siRNA identifier C target sequence sense strand
ugaaugcacgggcaaugaa

SEQ ID NO: 5 - RNA, 19 nt, Artificial Sequence
  ApoB-3050 siRNA identifier D target sequence sense strand
cgggagaaguggagcagua

SEQ ID NO: 6 - RNA, 19 nt, Artificial Sequence
  ApoB-3193 siRNA identifier E target sequence sense strand
agaagcaggaccuuaucua

SEQ ID NO: 7 - RNA, 19 nt, Artificial Sequence
  ApoB-3699 siRNA identifier F target sequence sense strand
ggacauggguuccaaauua

SEQ ID NO: 8 - DNA, 19 bp, Artificial Sequence
  ApoB-10067 siRNA target sequence sense strand
ccaatgctggactttataa

SEQ ID NO: 9 - DNA, 19 bp, Artificial Sequence
  ApoB-13205 siRNA target sequence sense strand
gcatgcttactgatataaa

SEQ ID NO: 10 - DNA, 19 bp, Artificial Sequence
  ApoB-309 siRNA target sequence sense strand
caaccagtgtacccttaaa

SEQ ID NO: 11 - RNA, 19 nt, Artificial Sequence
  ApoB-5490 siRNA identifier G target sequence sense strand
gaauguggguggcaacuuu

SEQ ID NO: 12 - RNA, 19 nt, Artificial Sequence
  ApoB-6134 siRNA identifier H target sequence sense strand
uuaauggcuuagagguaaa

SEQ ID NO: 13 - RNA, 21 nt, Artificial Sequence
  apob-1 siRNA duplex sense oligo
gucaucacacugaauaccaau

SEQ ID NO: 14 - RNA, 23 nt, Artificial Sequence
  apob-1 siRNA duplex antisense oligo
auugguauucagugugaugacac

SEQ ID NO: 15 - RNA, 21 nt, Artificial Sequence
  apob-1-mismatch ("mismatch") siRNA duplex sense oligo
gugaucagacucaauacgaau

SEQ ID NO: 16 - RNA, 23 nt, Artificial Sequence
  apob-1-mismatch ("mismatch") siRNA duplex antisense oligo
auucguauugagucugaucacac

SEQ ID NO: 17 - RNA, 19 nt, Artificial Sequence
  murine ApoB siRNA target sequence
gaagaaccauggaacaagu

SEQ ID NO: 18 - RNA, 19 nt, Artificial Sequence
  murine ApoB siRNA target sequence
gcaucaucaucccagacuu

SEQ ID NO: 19 - RNA, 19 nt, Artificial Sequence
  murine ApoB siRNA target sequence
ccaucacuuugaccaggaa

SEQ ID NO: 20 - RNA, 19 nt, Artificial Sequence
  murine ApoB siRNA target sequence
ggaauacguuucuucagaa

SEQ ID NO: 21 - RNA, 19 nt, Artificial Sequence
  murine ApoB siRNA target sequence
ccacaagauugauugaccu

SEQ ID NO: 22 - RNA, 23 nt, Artificial Sequence
  ApoB siRNA sense target sequence
aaagagguguauggcuucaaccc

SEQ ID NO: 23 - RNA, 23 nt, Artificial Sequence
  ApoB siRNA sense target sequence
aagagguguauggcuucaacccu

SEQ ID NO: 24 - RNA, 23 nt, Artificial Sequence
  ApoB siRNA sense target sequence
gagguguauggcuucaacccuga

SEQ ID NO: 25 - RNA, 23 nt, Artificial Sequence
  ApoB siRNA sense target sequence
cagccccaucacuuuacaagccu

SEQ ID NO: 26 - RNA, 23 nt, Artificial Sequence
  ApoB siRNA sense target sequence
caucacuuuacaagccuugguuc

SEQ ID NO: 27 - RNA, 23 nt, Artificial Sequence
  ApoB siRNA sense target sequence
caagccuugguucaguguggaca

SEQ ID NO: 28 - RNA, 23 nt, Artificial Sequence
  ApoB siRNA sense target sequence
aaaauagaagggaaucuuauauu

SEQ ID NO: 29 - RNA, 23 nt, Artificial Sequence
  ApoB siRNA sense target sequence
aaauagaagggaaucuuauauuu

SEQ ID NO: 30 - RNA, 23 nt, Artificial Sequence
  ApoB siRNA sense target sequence
aauagaagggaaucuuauauuug

SEQ ID NO: 31 - RNA, 23 nt, Artificial Sequence
  ApoB siRNA sense target sequence
uagaagggaaucuuauauuugau

SEQ ID NO: 32 - RNA, 23 nt, Artificial Sequence
  ApoB siRNA sense target sequence
gaagggaaucuuauauuugaucc

SEQ ID NO: 33 - RNA, 23 nt, Artificial Sequence
  ApoB siRNA sense target sequence
aagggaaucuuauauuugaucca

SEQ ID NO: 34 - RNA, 23 nt, Artificial Sequence
  ApoB siRNA sense target sequence
cagaugaacaccaacuucuucca

SEQ ID NO: 35 - RNA, 23 nt, Artificial Sequence
  ApoB siRNA sense target sequence
gaacaccaacuucuuccacgagu

SEQ ID NO: 36 - RNA, 23 nt, Artificial Sequence
  ApoB siRNA sense target sequence
aacaccaacuucuuccacgaguc

SEQ ID NO: 37 - RNA, 23 nt, Artificial Sequence
  ApoB siRNA sense target sequence
aauggacucaucugcuacagcuu

SEQ ID NO: 38 - RNA, 23 nt, Artificial Sequence
  ApoB siRNA sense target sequence
aaauggacucaucugcuacagcu

SEQ ID NO: 39 - RNA, 23 nt, Artificial Sequence
  ApoB siRNA sense target sequence
caagucugugggauuccaucugc

SEQ ID NO: 40 - RNA, 23 nt, Artificial Sequence
  ApoB siRNA sense target sequence
aagucugugggauuccaucugcc

SEQ ID NO: 41 - RNA, 23 nt, Artificial Sequence
  ApoB siRNA sense target sequence
caaggaucuggagaaacaacaua

SEQ ID NO: 42 - RNA, 23 nt, Artificial Sequence
  ApoB siRNA sense target sequence
aaggaucuggagaaacaacauau

SEQ ID NO: 43 - RNA, 23 nt, Artificial Sequence
  ApoB siRNA sense target sequence
gaucuggagaaacaacauaugac

SEQ ID NO: 44 - RNA, 23 nt, Artificial Sequence
  ApoB siRNA sense target sequence
gauacaauuugaucaguauauua

SEQ ID NO: 45 - RNA, 23 nt, Artificial Sequence
  ApoB siRNA sense target sequence
caauuugaucaguauauuaaaga

SEQ ID NO: 46 - RNA, 23 nt, Artificial Sequence
  ApoB siRNA sense target sequence
aauuugaucaguauauuaaagau

SEQ ID NO: 47 - RNA, 23 nt, Artificial Sequence
  ApoB siRNA sense target sequence
uauuggaacuuugaaaaauucuc

SEQ ID NO: 48 - RNA, 23 nt, Artificial Sequence
  ApoB siRNA sense target sequence
caagugucaucacacugaauacc

SEQ ID NO: 49 - RNA, 23 nt, Artificial Sequence
  ApoB siRNA sense target sequence
aagugucaucacacugaauacca

SEQ ID NO: 50 - RNA, 23 nt, Artificial Sequence
  ApoB siRNA sense target sequence
caucacacugaauaccaaugcug

SEQ ID NO: 51 - RNA, 23 nt, Artificial Sequence
  ApoB siRNA sense target sequence
uaauggaaauaccaagucaaaac

SEQ ID NO: 52 - RNA, 23 nt, Artificial Sequence
  ApoB siRNA sense target sequence
aauggaaauaccaagucaaaaac

SEQ ID NO: 53 - RNA, 23 nt, Artificial Sequence
  ApoB siRNA sense target sequence
uaacacuaagaaccagaagauca

SEQ ID NO: 54 - RNA, 23 nt, Artificial Sequence
  ApoB siRNA sense target sequence
aauugggaagaagaggcagcuuc

SEQ ID NO: 55 - DNA, 23 bp, Artificial Sequence
  human ApoB siRNA target sequence
tgcgacccgattcaagcacctcc

SEQ ID NO: 56 - DNA, 23 bp, Artificial Sequence
  human ApoB siRNA target sequence
tgccaccaggatcaactgcaagg

SEQ ID NO: 57 - DNA, 23 bp, Artificial Sequence
  human ApoB siRNA target sequence
acctacttacatcctgaacatca

SEQ ID NO: 58 - DNA, 23 bp, Artificial Sequence
  human ApoB siRNA target sequence
ctccactcactttaccgtcaaga

SEQ ID NO: 59 - DNA, 23 bp, Artificial Sequence
  human ApoB siRNA target sequence
catcagcccacttgctctcatca

SEQ ID NO: 60 - DNA, 23 bp, Artificial Sequence
  human ApoB siRNA target sequence
gaagatgggcctcgcatttgaga

SEQ ID NO: 61 - DNA, 23 bp, Artificial Sequence
  human ApoB siRNA target sequence
ggggatgaagattacacctattt

SEQ ID NO: 62 - DNA, 23 bp, Artificial Sequence
  human ApoB siRNA target sequence
ctctacaaatctgtttctcttcc

SEQ ID NO: 63 - DNA, 23 bp, Artificial Sequence
  human ApoB siRNA target sequence
aataactaccttcctaaagaaag

SEQ ID NO: 64 - DNA, 23 bp, Artificial Sequence
  human ApoB siRNA target sequence
ctggattacagttgcaaatatct

SEQ ID NO: 65 - DNA, 23 bp, Artificial Sequence
  human ApoB siRNA target sequence
gggcatcatcattccggacttcg

SEQ ID NO: 66 - DNA, 23 bp, Artificial Sequence
  human ApoB siRNA target sequence
ctggaggctcatgttgccctaaa

SEQ ID NO: 67 - DNA, 23 bp, Artificial Sequence
  human ApoB siRNA target sequence
aggcaacacattacatttggtct

SEQ ID NO: 68 - DNA, 23 bp, Artificial Sequence
  human ApoB siRNA target sequence
ggccacctaagttgtgacacaaa

SEQ ID NO: 69 - DNA, 23 bp, Artificial Sequence
  human ApoB siRNA target sequence
atcaagggtgttatttccatacc

SEQ ID NO: 70 - DNA, 23 bp, Artificial Sequence
  human ApoB siRNA target sequence
tgccaaactgcttctccaaatgg

SEQ ID NO: 71 - DNA, 23 bp, Artificial Sequence
  human ApoB siRNA target sequence
aggcaccaatgtagataccaaaa

SEQ ID NO: 72 - DNA, 23 bp, Artificial Sequence
  human ApoB siRNA target sequence
ctccagagatctaaagatgttag

SEQ ID NO: 73 - DNA, 23 bp, Artificial Sequence
  human ApoB siRNA target sequence
ctccacgaatgtctacagcaact

SEQ ID NO: 74 - DNA, 23 bp, Artificial Sequence
  human ApoB siRNA target sequence
gttgacctgctttcctacaatgt

SEQ ID NO: 75 - DNA, 23 bp, Artificial Sequence
  human ApoB siRNA target sequence
tatcaggctgattacgagtcatt

SEQ ID NO: 76 - DNA, 23 bp, Artificial Sequence
  human ApoB siRNA target sequence
agacaggcacctggaaactcaag

SEQ ID NO: 77 - DNA, 23 bp, Artificial Sequence
  human ApoB siRNA target sequence
caagacccaatttaacaacaatg

SEQ ID NO: 78 - DNA, 23 bp, Artificial Sequence
  human ApoB siRNA target sequence
cctgaagcacatcaatattgatc

SEQ ID NO: 79 - DNA, 23 bp, Artificial Sequence
  human ApoB siRNA target sequence
aagcacatcaatattgatcaatt

SEQ ID NO: 80 - DNA, 23 bp, Artificial Sequence
  human ApoB siRNA target sequence
gatgagcactatcatatccgtgt

SEQ ID NO: 81 - DNA, 23 bp, Artificial Sequence
  human ApoB siRNA target sequence
cagcacctagctggaaagttaaa

SEQ ID NO: 82 - DNA, 23 bp, Artificial Sequence
  human ApoB siRNA target sequence
gctaagcaatgtcctacaacaag

SEQ ID NO: 83 - DNA, 23 bp, Artificial Sequence
  human ApoB siRNA target sequence
aagcaatgtcctacaacaagtta

SEQ ID NO: 84 - DNA, 23 bp, Artificial Sequence
  human ApoB siRNA target sequence
tagcacacttgtcacctacattt

SEQ ID NO: 85 - DNA, 23 bp, Artificial Sequence
  human ApoB siRNA target sequence
gagcaatattctatccaagattg

SEQ ID NO: 86 - DNA, 23 bp, Artificial Sequence
  human ApoB siRNA target sequence
tacaattgactttgtcgaaatga

SEQ ID NO: 87 - DNA, 23 bp, Artificial Sequence
  human ApoB siRNA target sequence
gagaatcaccctgccagacttcc

SEQ ID NO: 88 - DNA, 23 bp, Artificial Sequence
  human ApoB siRNA target sequence
ccagacttccgtttaccagaaat

SEQ ID NO: 89 - DNA, 23 bp, Artificial Sequence
  human ApoB siRNA target sequence
atgcacaactctcaaaccctaag

SEQ ID NO: 90 - DNA, 23 bp, Artificial Sequence
  human ApoB siRNA target sequence
gcgcaacgagatcaagacactgt

SEQ ID NO: 91 - DNA, 23 bp, Artificial Sequence
  human ApoB siRNA target sequence
gaagatagacttcctgaataact

SEQ ID NO: 92 - DNA, 23 bp, Artificial Sequence
  human ApoB siRNA target sequence
ctgaataactatgcactgtttct

SEQ ID NO: 93 - DNA, 23 bp, Artificial Sequence
  human ApoB siRNA target sequence
agcaagcaagttggcaagtaagt

SEQ ID NO: 94 - DNA, 23 bp, Artificial Sequence
  human ApoB siRNA target sequence
caccatagagatgtcggcattcg

SEQ ID NO: 95 - DNA, 23 bp, Artificial Sequence
  human ApoB siRNA target sequence
aaccagtcagatattgttgctca

SEQ ID NO: 96 - DNA, 23 bp, Artificial Sequence
  human ApoB siRNA target sequence
gtggagggtagtcataacagtac

SEQ ID NO: 97 - DNA, 23 bp, Artificial Sequence
  human ApoB siRNA target sequence
gaccacaagcttagcttggaaag

SEQ ID NO: 98 - DNA, 23 bp, Artificial Sequence
  human ApoB siRNA target sequence
attgagtcatctaccaaaggaga

SEQ ID NO: 99 - DNA, 23 bp, Artificial Sequence
  human ApoB siRNA target sequence
gctaacctctctgaaagacaacg

SEQ ID NO: 100 - DNA, 23 bp, Artificial Sequence
  human ApoB siRNA target sequence
gtccataatggttcagaaatact

SEQ ID NO: 101 - DNA, 23 bp, Artificial Sequence
  human ApoB siRNA target sequence
gtatagggaactgttgaaagatt

SEQ ID NO: 102 - DNA, 23 bp, Artificial Sequence
  human ApoB siRNA target sequence
ctcaagtcaagttgagcaatttc

SEQ ID NO: 103 - DNA, 23 bp, Artificial Sequence
  human ApoB siRNA target sequence
caggaatatcttagcatccttac

SEQ ID NO: 104 - DNA, 23 bp, Artificial Sequence
  human ApoB siRNA target sequence
caccagcagtttagatataaact

SEQ ID NO: 105 - DNA, 23 bp, Artificial Sequence
  human ApoB siRNA target sequence
gaccaactctctgattactatga

SEQ ID NO: 106 - DNA, 23 bp, Artificial Sequence
  human ApoB siRNA target sequence
aggcagtagactataagcagaag

SEQ ID NO: 107 - DNA, 23 bp, Artificial Sequence
  murine ApoB siRNA target sequence
gcggacgccgttactgctgctgt

SEQ ID NO: 108 - DNA, 23 bp, Artificial Sequence
  murine ApoB siRNA target sequence
ccgaaagtacgtgtacaactatg

SEQ ID NO: 109 - DNA, 23 bp, Artificial Sequence
  murine ApoB siRNA target sequence
accaaccagtgtacccttaaaga

SEQ ID NO: 110 - DNA, 23 bp, Artificial Sequence
  murine ApoB siRNA target sequence
catgacacgtgttacacagaaac

SEQ ID NO: 111 - DNA, 23 bp, Artificial Sequence
  murine ApoB siRNA target sequence
tttgaagacccttcaagaactga

SEQ ID NO: 112 - DNA, 23 bp, Artificial Sequence
  murine ApoB siRNA target sequence
agccacagtgctatactcacatc

SEQ ID NO: 113 - DNA, 23 bp, Artificial Sequence
  murine ApoB siRNA target sequence
tgtcacctacctgatggctctga

SEQ ID NO: 114 - DNA, 23 bp, Artificial Sequence
  murine ApoB siRNA target sequence
agccacgcagttaacagctattt

SEQ ID NO: 115 - DNA, 23 bp, Artificial Sequence
  murine ApoB siRNA target sequence
gggaagaaccatggaacaagtaa

SEQ ID NO: 116 - DNA, 23 bp, Artificial Sequence
  murine ApoB siRNA target sequence
gaagaactgtatgtccaagatct

SEQ ID NO: 117 - DNA, 23 bp, Artificial Sequence
  murine ApoB siRNA target sequence
ctggagaattctcaatttccaac

SEQ ID NO: 118 - DNA, 23 bp, Artificial Sequence
  murine ApoB siRNA target sequence
aagcagttatcttcccagagaaa

SEQ ID NO: 119 - DNA, 23 bp, Artificial Sequence
  murine ApoB siRNA target sequence
tttgagattggtttagaaggaaa

SEQ ID NO: 120 - DNA, 23 bp, Artificial Sequence
  murine ApoB siRNA target sequence
gtggaccactttggctatactac

SEQ ID NO: 121 - DNA, 23 bp, Artificial Sequence
  murine ApoB siRNA target sequence
gtgcacaaactttgcagggaatc

SEQ ID NO: 122 - DNA, 23 bp, Artificial Sequence
  murine ApoB siRNA target sequence
gggcatcatcatcccagacttcg

SEQ ID NO: 123 - DNA, 23 bp, Artificial Sequence
  murine ApoB siRNA target sequence
aaagaggccagtcaagctgttca

SEQ ID NO: 124 - DNA, 23 bp, Artificial Sequence
  murine ApoB siRNA target sequence
cagcaacacactgcatctggtct

SEQ ID NO: 125 - DNA, 23 bp, Artificial Sequence
  murine ApoB siRNA target sequence
caggagcttactccaacgccagc

SEQ ID NO: 126 - DNA, 23 bp, Artificial Sequence
  murine ApoB siRNA target sequence
gtggagcagtattctgccactgc

SEQ ID NO: 127 - DNA, 23 bp, Artificial Sequence
  murine ApoB siRNA target sequence
gtgcagcagtctgaagctactgt

SEQ ID NO: 128 - DNA, 23 bp, Artificial Sequence
  murine ApoB siRNA target sequence
gatcacctcaatagcctctcaga

SEQ ID NO: 129 - DNA, 23 bp, Artificial Sequence
  murine ApoB siRNA target sequence
ttccacaaatgtctacagcaatt

SEQ ID NO: 130 - DNA, 23 bp, Artificial Sequence
  murine ApoB siRNA target sequence
tgtgagagagatgttacaactgg

SEQ ID NO: 131 - DNA, 23 bp, Artificial Sequence
  murine ApoB siRNA target sequence
aagaacacagcttccttgaaata

SEQ ID NO: 132 - DNA, 23 bp, Artificial Sequence
  murine ApoB siRNA target sequence
tctcactggacttcttctcaaaa

SEQ ID NO: 133 - DNA, 23 bp, Artificial Sequence
  murine ApoB siRNA target sequence
agctacagccctattctttcata

SEQ ID NO: 134 - DNA, 23 bp, Artificial Sequence
  murine ApoB siRNA target sequence
ctacagccctattctttcataac

SEQ ID NO: 135 - DNA, 23 bp, Artificial Sequence
  murine ApoB siRNA target sequence
gggcagctatatagtaagtttct

SEQ ID NO: 136 - DNA, 23 bp, Artificial Sequence
  murine ApoB siRNA target sequence
caagaccaaactgaatgacaaag

SEQ ID NO: 137 - DNA, 23 bp, Artificial Sequence
  murine ApoB siRNA target sequence
gcctacaacactaaagacaaaat

SEQ ID NO: 138 - DNA, 23 bp, Artificial Sequence
  murine ApoB siRNA target sequence
ttagaggtaaatgatgctgttga

SEQ ID NO: 139 - DNA, 23 bp, Artificial Sequence
  murine ApoB siRNA target sequence
caccatcaacctcccattcttca

SEQ ID NO: 140 - DNA, 23 bp, Artificial Sequence
  murine ApoB siRNA target sequence
ttggagagaaatcgaagaggaat

SEQ ID NO: 141 - DNA, 23 bp, Artificial Sequence
  murine ApoB siRNA target sequence
cctcagcagattcatcattatct

SEQ ID NO: 142 - DNA, 23 bp, Artificial Sequence
  murine ApoB siRNA target sequence
gaacagtatcatatccgtgtaaa

SEQ ID NO: 143 - DNA, 23 bp, Artificial Sequence
  murine ApoB siRNA target sequence
attgactgacatgttggtgaaga

SEQ ID NO: 144 - DNA, 23 bp, Artificial Sequence
  murine ApoB siRNA target sequence
tgacatgttggtgaagaagttga

SEQ ID NO: 145 - DNA, 23 bp, Artificial Sequence
  murine ApoB siRNA target sequence
atgaaagaccatttccaagatac

SEQ ID NO: 146 - DNA, 23 bp, Artificial Sequence
  murine ApoB siRNA target sequence
gcagagcaatattccatccaaaa

SEQ ID NO: 147 - DNA, 23 bp, Artificial Sequence
  murine ApoB siRNA target sequence
tttgaggtcagtctccgtgctct

SEQ ID NO: 148 - DNA, 23 bp, Artificial Sequence
  murine ApoB siRNA target sequence
attcactcttctcaacaccttcc

SEQ ID NO: 149 - DNA, 23 bp, Artificial Sequence
  murine ApoB siRNA target sequence
tacaattgacttgctggaaataa

SEQ ID NO: 150 - DNA, 23 bp, Artificial Sequence
  murine ApoB siRNA target sequence
cattagaactatcgaccaaattt

SEQ ID NO: 151 - DNA, 23 bp, Artificial Sequence
  murine ApoB siRNA target sequence
tggtatgactgtcaaagtaaaca

SEQ ID NO: 152 - DNA, 23 bp, Artificial Sequence
  murine ApoB siRNA target sequence
gcatacattcgtcccaaattagc

SEQ ID NO: 153 - DNA, 23 bp, Artificial Sequence
  murine ApoB siRNA target sequence
gagtaccagattcaatcagtaca

SEQ ID NO: 154 - DNA, 23 bp, Artificial Sequence
  murine ApoB siRNA target sequence
aagaaacaggcttgaaagaattt

SEQ ID NO: 155 - DNA, 23 bp, Artificial Sequence
  murine ApoB siRNA target sequence
caccattagtttaaccaagaaaa

SEQ ID NO: 156 - DNA, 23 bp, Artificial Sequence
  murine ApoB siRNA target sequence
gccaacctccatgctcccatatt

SEQ ID NO: 157 - DNA, 23 bp, Artificial Sequence
  murine ApoB siRNA target sequence
aagcaggaacttaatggaaatac

SEQ ID NO: 158 - DNA, 23 bp, Artificial Sequence
  murine ApoB siRNA target sequence
atccattgaactaaactatgact

SEQ ID NO: 159 - DNA, 23 bp, Artificial Sequence
  murine ApoB siRNA target sequence
ctgcactctactgcaacaggagg

SEQ ID NO: 160 - DNA, 23 bp, Artificial Sequence
  murine ApoB siRNA target sequence
tctcaggaatattcaggaagtgt

SEQ ID NO: 161 - DNA, 23 bp, Artificial Sequence
  murine ApoB siRNA target sequence
gtcaaccttgctacaggttcatg

SEQ ID NO: 162 - DNA, 23 bp, Artificial Sequence
  murine ApoB siRNA target sequence
ctccatcactttgaccaggaagt

SEQ ID NO: 163 - DNA, 23 bp, Artificial Sequence
  murine ApoB siRNA target sequence
tttgaggcaactatacctgaaat

SEQ ID NO: 164 - DNA, 23 bp, Artificial Sequence
  murine ApoB siRNA target sequence
tctgaataagttggccaacatga

SEQ ID NO: 165 - DNA, 23 bp, Artificial Sequence
  murine ApoB siRNA target sequence
ggccaacatgattgccgatgttg

SEQ ID NO: 166 - DNA, 23 bp, Artificial Sequence
  murine ApoB siRNA target sequence
gccaacatgattgccgatgttga

SEQ ID NO: 167 - DNA, 23 bp, Artificial Sequence
  murine ApoB siRNA target sequence
cttcaacactgtgacttcaatgt

SEQ ID NO: 168 - DNA, 23 bp, Artificial Sequence
  murine ApoB siRNA target sequence
gtggagtataatgaagatggtct

SEQ ID NO: 169 - DNA, 23 bp, Artificial Sequence
  murine ApoB siRNA target sequence
actgactgactttcatctgtact

SEQ ID NO: 170 - DNA, 23 bp, Artificial Sequence
  murine ApoB siRNA target sequence
ctggaatacgtttcttcagaact

SEQ ID NO: 171 - DNA, 23 bp, Artificial Sequence
  murine ApoB siRNA target sequence
tgccagaaggatggttgatgaaa

SEQ ID NO: 172 - DNA, 23 bp, Artificial Sequence
  murine ApoB siRNA target sequence
gaagagggtgttagacagtatag

SEQ ID NO: 173 - DNA, 23 bp, Artificial Sequence
  murine ApoB siRNA target sequence
ggccaacaggatatcaagtttac

SEQ ID NO: 174 - DNA, 23 bp, Artificial Sequence
  murine ApoB siRNA target sequence
aatgactttcttcaatccatact

SEQ ID NO: 175 - DNA, 23 bp, Artificial Sequence
  murine ApoB siRNA target sequence
agagagtatcttagcatgcttac

SEQ ID NO: 176 - DNA, 23 bp, Artificial Sequence
  murine ApoB siRNA target sequence
tcttagcatgcttactgatataa

SEQ ID NO: 177 - DNA, 23 bp, Artificial Sequence
  murine ApoB siRNA target sequence
gaccaactctctagctactatga

SEQ ID NO: 178 - DNA, 23 bp, Artificial Sequence
  murine ApoB siRNA target sequence
gtccacaagattgattgacctgt

SEQ ID NO: 179 - DNA, 23 bp, Artificial Sequence
  murine ApoB siRNA target sequence
tctcagatacatcaccgagttac

SEQ ID NO: 180 - DNA, 23 bp, Artificial Sequence
  murine ApoB siRNA target sequence
catcaccgagttactgagaaagc

SEQ ID NO: 181 - DNA, 23 bp, Artificial Sequence
  murine ApoB siRNA target sequence
gtagactactataaagaccatcc

SEQ ID NO: 182 - DNA, 23 bp, Artificial Sequence
  murine ApoB siRNA target sequence
tgcaaccaagctggcataagaac

SEQ ID NO: 183 - DNA, 23 bp, Artificial Sequence
  human ApoB siRNA sequence
attcccaccgggacctgcggggc

SEQ ID NO: 184 - DNA, 23 bp, Artificial Sequence
  human ApoB siRNA sequence
ttcccaccgggacctgcggggct

SEQ ID NO: 185 - DNA, 23 bp, Artificial Sequence
  human ApoB siRNA sequence
tcccaccgggacctgcggggctg

SEQ ID NO: 186 - DNA, 23 bp, Artificial Sequence
  human ApoB siRNA sequence
cccaccgggacctgcggggctga

SEQ ID NO: 187 - DNA, 23 bp, Artificial Sequence
  human ApoB siRNA sequence
ccaccgggacctgcggggctgag

SEQ ID NO: 188 - DNA, 23 bp, Artificial Sequence
  human ApoB siRNA sequence
caccgggacctgcggggctgagt

SEQ ID NO: 189 - DNA, 23 bp, Artificial Sequence
  human ApoB siRNA sequence
accgggacctgcggggctgagtg

SEQ ID NO: 190 - DNA, 23 bp, Artificial Sequence
  human ApoB siRNA sequence
ccgggacctgcggggctgagtgc

SEQ ID NO: 191 - DNA, 23 bp, Artificial Sequence
  human ApoB siRNA sequence
cgggacctgcggggctgagtgcc

SEQ ID NO: 192 - DNA, 23 bp, Artificial Sequence
  human ApoB siRNA sequence
gggacctgcggggctgagtgccc

SEQ ID NO: 193 - DNA, 23 bp, Artificial Sequence
  human ApoB siRNA sequence
ggacctgcggggctgagtgccct

SEQ ID NO: 194 - DNA, 23 bp, Artificial Sequence
  human ApoB siRNA sequence
gacctgcggggctgagtgccctt

SEQ ID NO: 195 - DNA, 23 bp, Artificial Sequence
  human ApoB siRNA sequence
acctgcggggctgagtgcccttc

SEQ ID NO: 196 - DNA, 23 bp, Artificial Sequence
  human ApoB siRNA sequence
cctgcggggctgagtgcccttct

SEQ ID NO: 197 - DNA, 23 bp, Artificial Sequence
  human ApoB siRNA sequence
ctgcggggctgagtgcccttctc

SEQ ID NO: 198 - DNA, 23 bp, Artificial Sequence
  human ApoB siRNA sequence
tgcggggctgagtgcccttctcg

SEQ ID NO: 199 - DNA, 23 bp, Artificial Sequence
  human ApoB siRNA sequence
gcggggctgagtgcccttctcgg

SEQ ID NO: 200 - DNA, 23 bp, Artificial Sequence
  human ApoB siRNA sequence
cggggctgagtgcccttctcggt

SEQ ID NO: 201 - DNA, 23 bp, Artificial Sequence
  human ApoB siRNA sequence
ggggctgagtgcccttctcggtt

SEQ ID NO: 202 - DNA, 23 bp, Artificial Sequence
  human ApoB siRNA sequence
gggctgagtgcccttctcggttg

SEQ ID NO: 203 - DNA, 23 bp, Artificial Sequence
  human ApoB siRNA sequence
ggctgagtgcccttctcggttgc

SEQ ID NO: 204 - DNA, 23 bp, Artificial Sequence
  human ApoB siRNA sequence
gctgagtgcccttctcggttgct

SEQ ID NO: 205 - DNA, 23 bp, Artificial Sequence
  human ApoB siRNA sequence
ctgagtgcccttctcggttgctg

SEQ ID NO: 206 - DNA, 23 bp, Artificial Sequence
  human ApoB siRNA sequence
tgagtgcccttctcggttgctgc

SEQ ID NO: 207 - DNA, 23 bp, Artificial Sequence
  human ApoB siRNA sequence
gagtgcccttctcggttgctgcc

SEQ ID NO: 208 - DNA, 23 bp, Artificial Sequence
  human ApoB siRNA sequence
agtgcccttctcggttgctgccg

SEQ ID NO: 209 - DNA, 23 bp, Artificial Sequence
  human ApoB siRNA sequence
gtgcccttctcggttgctgccgc

SEQ ID NO: 210 - DNA, 23 bp, Artificial Sequence
  human ApoB siRNA sequence
tgcccttctcggttgctgccgct

SEQ ID NO: 211 - DNA, 23 bp, Artificial Sequence
  human ApoB siRNA sequence
gcccttctcggttgctgccgctg

SEQ ID NO: 212 - DNA, 23 bp, Artificial Sequence
  human ApoB siRNA sequence
cccttctcggttgctgccgctga

SEQ ID NO: 213 - DNA, 23 bp, Artificial Sequence
  human ApoB siRNA sequence
ccttctcggttgctgccgctgag

SEQ ID NO: 214 - DNA, 23 bp, Artificial Sequence
  human ApoB siRNA sequence
cttctcggttgctgccgctgagg

SEQ ID NO: 215 - DNA, 23 bp, Artificial Sequence
  human ApoB siRNA sequence
ttctcggttgctgccgctgagga

SEQ ID NO: 216 - DNA, 23 bp, Artificial Sequence
  human ApoB siRNA sequence
tctcggttgctgccgctgaggag

SEQ ID NO: 217 - DNA, 23 bp, Artificial Sequence
  human ApoB siRNA sequence
ctcggttgctgccgctgaggagc

SEQ ID NO: 218 - DNA, 23 bp, Artificial Sequence
  human ApoB siRNA sequence
tcggttgctgccgctgaggagcc

SEQ ID NO: 219 - DNA, 23 bp, Artificial Sequence
  human ApoB siRNA sequence
cggttgctgccgctgaggagccc

SEQ ID NO: 220 - DNA, 23 bp, Artificial Sequence
  human ApoB siRNA sequence
ggttgctgccgctgaggagcccg

SEQ ID NO: 221 - DNA, 23 bp, Artificial Sequence
  human ApoB siRNA sequence
gttgctgccgctgaggagcccgc

SEQ ID NO: 222 - DNA, 23 bp, Artificial Sequence
  human ApoB siRNA sequence
ttgctgccgctgaggagcccgcc

SEQ ID NO: 223 - DNA, 23 bp, Artificial Sequence
  human ApoB siRNA sequence
tgctgccgctgaggagcccgccc

SEQ ID NO: 224 - DNA, 23 bp, Artificial Sequence
  human ApoB siRNA sequence
gctgccgctgaggagcccgccca

SEQ ID NO: 225 - DNA, 23 bp, Artificial Sequence
  human ApoB siRNA sequence
ctgccgctgaggagcccgcccag

SEQ ID NO: 226 - DNA, 23 bp, Artificial Sequence
  human ApoB siRNA sequence
tgccgctgaggagcccgcccagc

SEQ ID NO: 227 - DNA, 23 bp, Artificial Sequence
  human ApoB siRNA sequence
gccgctgaggagcccgcccagcc

SEQ ID NO: 228 - DNA, 23 bp, Artificial Sequence
  human ApoB siRNA sequence
ccgctgaggagcccgcccagcca

SEQ ID NO: 229 - DNA, 23 bp, Artificial Sequence
  human ApoB siRNA sequence
cgctgaggagcccgcccagccag

SEQ ID NO: 230 - DNA, 23 bp, Artificial Sequence
  human ApoB siRNA sequence
gctgaggagcccgcccagccagc

SEQ ID NO: 231 - DNA, 23 bp, Artificial Sequence
  human ApoB siRNA sequence
ctgaggagcccgcccagccagcc

SEQ ID NO: 232 - DNA, 23 bp, Artificial Sequence
  human ApoB siRNA sequence
tgaggagcccgcccagccagcca

SEQ ID NO: 233 - DNA, 23 bp, Artificial Sequence
  human ApoB siRNA sequence
gaggagcccgcccagccagccag

SEQ ID NO: 234 - DNA, 23 bp, Artificial Sequence
  human ApoB siRNA sequence
aggagcccgcccagccagccagg

SEQ ID NO: 235 - DNA, 23 bp, Artificial Sequence
  human ApoB siRNA sequence
ggagcccgcccagccagccaggg

SEQ ID NO: 236 - DNA, 23 bp, Artificial Sequence
  human ApoB siRNA sequence
gagcccgcccagccagccagggc

SEQ ID NO: 237 - DNA, 23 bp, Artificial Sequence
  human ApoB siRNA sequence
agcccgcccagccagccagggcc

SEQ ID NO: 238 - DNA, 23 bp, Artificial Sequence
  human ApoB siRNA sequence
gcccgcccagccagccagggccg

SEQ ID NO: 239 - DNA, 23 bp, Artificial Sequence
  human ApoB siRNA sequence
cccgcccagccagccagggccgc

SEQ ID NO: 240 - DNA, 23 bp, Artificial Sequence
  human ApoB siRNA sequence
ccgcccagccagccagggccgcg

SEQ ID NO: 241 - DNA, 23 bp, Artificial Sequence
  human ApoB siRNA sequence
cgcccagccagccagggccgcga

SEQ ID NO: 242 - DNA, 23 bp, Artificial Sequence
  human ApoB siRNA sequence
gcccagccagccagggccgcgag

SEQ ID NO: 243 - DNA, 23 bp, Artificial Sequence
  human ApoB siRNA sequence
cccagccagccagggccgcgagg

SEQ ID NO: 244 - DNA, 23 bp, Artificial Sequence
  human ApoB siRNA sequence
ccagccagccagggccgcgaggc

SEQ ID NO: 245 - DNA, 23 bp, Artificial Sequence
  human ApoB siRNA sequence
cagccagccagggccgcgaggcc

SEQ ID NO: 246 - DNA, 23 bp, Artificial Sequence
  human ApoB siRNA sequence
agccagccagggccgcgaggccg

SEQ ID NO: 247 - DNA, 23 bp, Artificial Sequence
  human ApoB siRNA sequence
gccagccagggccgcgaggccga

SEQ ID NO: 248 - DNA, 23 bp, Artificial Sequence
  human ApoB siRNA sequence
ccagccagggccgcgaggccgag

SEQ ID NO: 249 - DNA, 23 bp, Artificial Sequence
  human ApoB siRNA sequence
cagccagggccgcgaggccgagg

SEQ ID NO: 250 - DNA, 23 bp, Artificial Sequence
  human ApoB siRNA sequence
agccagggccgcgaggccgaggc

SEQ ID NO: 251 - DNA, 23 bp, Artificial Sequence
  human ApoB siRNA sequence
gccagggccgcgaggccgaggcc

SEQ ID NO: 252 - DNA, 23 bp, Artificial Sequence
  human ApoB siRNA sequence
ccagggccgcgaggccgaggcca

SEQ ID NO: 253 - DNA, 23 bp, Artificial Sequence
  human ApoB siRNA sequence
cagggccgcgaggccgaggccag

SEQ ID NO: 254 - DNA, 23 bp, Artificial Sequence
  human ApoB siRNA sequence
agggccgcgaggccgaggccagg

SEQ ID NO: 255 - DNA, 23 bp, Artificial Sequence
  human ApoB siRNA sequence
gggccgcgaggccgaggccaggc

SEQ ID NO: 256 - DNA, 23 bp, Artificial Sequence
  human ApoB siRNA sequence
ggccgcgaggccgaggccaggcc

SEQ ID NO: 257 - DNA, 23 bp, Artificial Sequence
  human ApoB siRNA sequence
gccgcgaggccgaggccaggccg

SEQ ID NO: 258 - DNA, 23 bp, Artificial Sequence
  human ApoB siRNA sequence
ccgcgaggccgaggccaggccgc

SEQ ID NO: 259 - DNA, 23 bp, Artificial Sequence
  human ApoB siRNA sequence
cgcgaggccgaggccaggccgca

SEQ ID NO: 260 - DNA, 23 bp, Artificial Sequence
  human ApoB siRNA sequence
gcgaggccgaggccaggccgcag

SEQ ID NO: 261 - DNA, 23 bp, Artificial Sequence
  human ApoB siRNA sequence
cgaggccgaggccaggccgcagc

SEQ ID NO: 262 - DNA, 23 bp, Artificial Sequence
  human ApoB siRNA sequence
gaggccgaggccaggccgcagcc

SEQ ID NO: 263 - DNA, 23 bp, Artificial Sequence
  human ApoB siRNA sequence
aggccgaggccaggccgcagccc

SEQ ID NO: 264 - DNA, 23 bp, Artificial Sequence
  human ApoB siRNA sequence
ggccgaggccaggccgcagccca

SEQ ID NO: 265 - DNA, 23 bp, Artificial Sequence
  human ApoB siRNA sequence
gccgaggccaggccgcagcccag

SEQ ID NO: 266 - DNA, 23 bp, Artificial Sequence
  human ApoB siRNA sequence
ccgaggccaggccgcagcccagg

SEQ ID NO: 267 - DNA, 23 bp, Artificial Sequence
  human ApoB siRNA sequence
cgaggccaggccgcagcccagga

SEQ ID NO: 268 - DNA, 23 bp, Artificial Sequence
  human ApoB siRNA sequence
gaggccaggccgcagcccaggag

SEQ ID NO: 269 - DNA, 23 bp, Artificial Sequence
  human ApoB siRNA sequence
aggccaggccgcagcccaggagc

SEQ ID NO: 270 - DNA, 23 bp, Artificial Sequence
  human ApoB siRNA sequence
ggccaggccgcagcccaggagcc

SEQ ID NO: 271 - DNA, 23 bp, Artificial Sequence
  human ApoB siRNA sequence
gccaggccgcagcccaggagccg

SEQ ID NO: 272 - DNA, 23 bp, Artificial Sequence
  human ApoB siRNA sequence
ccaggccgcagcccaggagccgc

SEQ ID NO: 273 - DNA, 23 bp, Artificial Sequence
  human ApoB siRNA sequence
caggccgcagcccaggagccgcc

SEQ ID NO: 274 - DNA, 23 bp, Artificial Sequence
  human ApoB siRNA sequence
aggccgcagcccaggagccgccc

SEQ ID NO: 275 - DNA, 23 bp, Artificial Sequence
  human ApoB siRNA sequence
ggccgcagcccaggagccgcccc

SEQ ID NO: 276 - DNA, 23 bp, Artificial Sequence
  human ApoB siRNA sequence
gccgcagcccaggagccgcccca

SEQ ID NO: 277 - DNA, 23 bp, Artificial Sequence
  human ApoB siRNA sequence
ccgcagcccaggagccgccccac

SEQ ID NO: 278 - DNA, 23 bp, Artificial Sequence
  human ApoB siRNA sequence
cgcagcccaggagccgccccacc

SEQ ID NO: 279 - DNA, 23 bp, Artificial Sequence
  human ApoB siRNA sequence
gcagcccaggagccgccccaccg

SEQ ID NO: 280 - DNA, 23 bp, Artificial Sequence
  human ApoB siRNA sequence
cagcccaggagccgccccaccgc

SEQ ID NO: 281 - DNA, 23 bp, Artificial Sequence
  human ApoB siRNA sequence
agcccaggagccgccccaccgca

SEQ ID NO: 282 - DNA, 23 bp, Artificial Sequence
  human ApoB siRNA sequence
gcccaggagccgccccaccgcag

SEQ ID NO: 283 - DNA, 23 bp, Artificial Sequence
  human ApoB siRNA sequence
cccaggagccgccccaccgcagc

SEQ ID NO: 284 - DNA, 23 bp, Artificial Sequence
  human ApoB siRNA sequence
ccaggagccgccccaccgcagct

SEQ ID NO: 285 - DNA, 23 bp, Artificial Sequence
  human ApoB siRNA sequence
caggagccgccccaccgcagctg

SEQ ID NO: 286 - DNA, 23 bp, Artificial Sequence
  human ApoB siRNA sequence
aggagccgccccaccgcagctgg

SEQ ID NO: 287 - DNA, 23 bp, Artificial Sequence
  human ApoB siRNA sequence
ggagccgccccaccgcagctggc

SEQ ID NO: 288 - DNA, 23 bp, Artificial Sequence
  human ApoB siRNA sequence
atggacccgccgaggcccgcgct

SEQ ID NO: 289 - DNA, 23 bp, Artificial Sequence
  human ApoB siRNA sequence
aggcccgcgctgctggcgctgct

SEQ ID NO: 290 - DNA, 23 bp, Artificial Sequence
  human ApoB siRNA sequence
ggcccgcgctgctggcgctgctg

SEQ ID NO: 291 - DNA, 23 bp, Artificial Sequence
  human ApoB siRNA sequence
gcccgcgctgctggcgctgctgg

SEQ ID NO: 292 - DNA, 23 bp, Artificial Sequence
  human ApoB siRNA sequence
cccgcgctgctggcgctgctggc

SEQ ID NO: 293 - DNA, 23 bp, Artificial Sequence
  human ApoB siRNA sequence
ccgcgctgctggcgctgctggcg

SEQ ID NO: 294 - DNA, 23 bp, Artificial Sequence
  human ApoB siRNA sequence
cgcgctgctggcgctgctggcgc

SEQ ID NO: 295 - DNA, 23 bp, Artificial Sequence
  human ApoB siRNA sequence
gcgctgctggcgctgctggcgct

SEQ ID NO: 296 - DNA, 23 bp, Artificial Sequence
  human ApoB siRNA sequence
cgctgctggcgctgctggcgctg

SEQ ID NO: 297 - DNA, 23 bp, Artificial Sequence
  human ApoB siRNA sequence
gctgctggcgctgctggcgctgc

SEQ ID NO: 298 - DNA, 23 bp, Artificial Sequence
  human ApoB siRNA sequence
ctgctggcgctgctggcgctgcc

SEQ ID NO: 299 - DNA, 23 bp, Artificial Sequence
  human ApoB siRNA sequence
tgctggcgctgctggcgctgcct

SEQ ID NO: 300 - DNA, 23 bp, Artificial Sequence
  human ApoB siRNA sequence
gctggcgctgctggcgctgcctg

SEQ ID NO: 301 - DNA, 23 bp, Artificial Sequence
  human ApoB siRNA sequence
ctggcgctgctggcgctgcctgc

SEQ ID NO: 302 - DNA, 23 bp, Artificial Sequence
  human ApoB siRNA sequence
tggcgctgctggcgctgcctgcg

SEQ ID NO: 303 - DNA, 23 bp, Artificial Sequence
  human ApoB siRNA sequence
ggcgctgctggcgctgcctgcgc

SEQ ID NO: 304 - DNA, 23 bp, Artificial Sequence
  human ApoB siRNA sequence
gcgctgctggcgctgcctgcgct

SEQ ID NO: 305 - DNA, 23 bp, Artificial Sequence
  human ApoB siRNA sequence
cgctgctggcgctgcctgcgctg

SEQ ID NO: 306 - DNA, 23 bp, Artificial Sequence
  human ApoB siRNA sequence
gctgctggcgctgcctgcgctgc

SEQ ID NO: 307 - DNA, 23 bp, Artificial Sequence
  human ApoB siRNA sequence
ctgctggcgctgcctgcgctgct

SEQ ID NO: 308 - DNA, 23 bp, Artificial Sequence
  human ApoB siRNA sequence
tgctggcgctgcctgcgctgctg

SEQ ID NO: 309 - DNA, 23 bp, Artificial Sequence
  human ApoB siRNA sequence
gctggcgctgcctgcgctgctgc

SEQ ID NO: 310 - DNA, 23 bp, Artificial Sequence
  human ApoB siRNA sequence
ctggcgctgcctgcgctgctgct

SEQ ID NO: 311 - DNA, 23 bp, Artificial Sequence
  human ApoB siRNA sequence
tggcgctgcctgcgctgctgctg

SEQ ID NO: 312 - DNA, 23 bp, Artificial Sequence
  human ApoB siRNA sequence
ggcgctgcctgcgctgctgctgc

SEQ ID NO: 313 - DNA, 23 bp, Artificial Sequence
  human ApoB siRNA sequence
gcgctgcctgcgctgctgctgct

SEQ ID NO: 314 - DNA, 23 bp, Artificial Sequence
  human ApoB siRNA sequence
cgctgcctgcgctgctgctgctg

SEQ ID NO: 315 - DNA, 23 bp, Artificial Sequence
  human ApoB siRNA sequence
gctgcctgcgctgctgctgctgc

SEQ ID NO: 316 - DNA, 23 bp, Artificial Sequence
  human ApoB siRNA sequence
ctgcctgcgctgctgctgctgct

SEQ ID NO: 317 - DNA, 23 bp, Artificial Sequence
  human ApoB siRNA sequence
tgcctgcgctgctgctgctgctg

SEQ ID NO: 318 - DNA, 23 bp, Artificial Sequence
  human ApoB siRNA sequence
gcctgcgctgctgctgctgctgc

SEQ ID NO: 319 - DNA, 23 bp, Artificial Sequence
  human ApoB siRNA sequence
cctgcgctgctgctgctgctgct

SEQ ID NO: 320 - DNA, 23 bp, Artificial Sequence
  human ApoB siRNA sequence
ctgcgctgctgctgctgctgctg

SEQ ID NO: 321 - DNA, 23 bp, Artificial Sequence
  human ApoB siRNA sequence
tgcgctgctgctgctgctgctgg

SEQ ID NO: 322 - DNA, 23 bp, Artificial Sequence
  human ApoB siRNA sequence
gcgctgctgctgctgctgctggc

SEQ ID NO: 323 - DNA, 23 bp, Artificial Sequence
  human ApoB siRNA sequence
cgctgctgctgctgctgctggcg

SEQ ID NO: 324 - DNA, 23 bp, Artificial Sequence
  human ApoB siRNA sequence
gctgctgctgctgctgctggcgg

SEQ ID NO: 325 - DNA, 23 bp, Artificial Sequence
  human ApoB siRNA sequence
ctgctgctgctgctgctggcggg

SEQ ID NO: 326 - DNA, 23 bp, Artificial Sequence
  human ApoB siRNA sequence
tgctgctgctgctgctggcgggc

SEQ ID NO: 327 - DNA, 23 bp, Artificial Sequence
  human ApoB siRNA sequence
gctgctgctgctgctggcgggcg

SEQ ID NO: 328 - DNA, 23 bp, Artificial Sequence
  human ApoB siRNA sequence
ctgctgctgctgctggcgggcgc

SEQ ID NO: 329 - DNA, 23 bp, Artificial Sequence
  human ApoB siRNA sequence
tgctgctgctgctggcgggcgcc

SEQ ID NO: 330 - DNA, 23 bp, Artificial Sequence
  human ApoB siRNA sequence
ggcgggcgccagggccgaagagg

SEQ ID NO: 331 - DNA, 23 bp, Artificial Sequence
  human ApoB siRNA sequence
gcgggcgccagggccgaagagga

SEQ ID NO: 332 - DNA, 23 bp, Artificial Sequence
  human ApoB siRNA sequence
cgggcgccagggccgaagaggaa

SEQ ID NO: 333 - DNA, 23 bp, Artificial Sequence
  human ApoB siRNA sequence
gggcgccagggccgaagaggaaa

SEQ ID NO: 334 - DNA, 23 bp, Artificial Sequence
  human ApoB siRNA sequence
ggcgccagggccgaagaggaaat

SEQ ID NO: 335 - DNA, 23 bp, Artificial Sequence
  human ApoB siRNA sequence
gcgccagggccgaagaggaaatg

SEQ ID NO: 336 - DNA, 23 bp, Artificial Sequence
  human ApoB siRNA sequence
cgccagggccgaagaggaaatgc

SEQ ID NO: 337 - DNA, 23 bp, Artificial Sequence
  human ApoB siRNA sequence
gccagggccgaagaggaaatgct

SEQ ID NO: 338 - DNA, 23 bp, Artificial Sequence
  human ApoB siRNA sequence
ccagggccgaagaggaaatgctg

SEQ ID NO: 339 - DNA, 23 bp, Artificial Sequence
  human ApoB siRNA sequence
cagggccgaagaggaaatgctgg

SEQ ID NO: 340 - DNA, 23 bp, Artificial Sequence
  human ApoB siRNA sequence
agggccgaagaggaaatgctgga

SEQ ID NO: 341 - DNA, 23 bp, Artificial Sequence
  human ApoB siRNA sequence
gggccgaagaggaaatgctggaa

SEQ ID NO: 342 - DNA, 23 bp, Artificial Sequence
  human ApoB siRNA sequence
ggccgaagaggaaatgctggaaa

SEQ ID NO: 343 - DNA, 23 bp, Artificial Sequence
  human ApoB siRNA sequence
gccgaagaggaaatgctggaaaa

SEQ ID NO: 344 - DNA, 23 bp, Artificial Sequence
  human ApoB siRNA sequence
ccgaagaggaaatgctggaaaat

SEQ ID NO: 345 - DNA, 23 bp, Artificial Sequence
  human ApoB siRNA sequence
cgaagaggaaatgctggaaaatg

SEQ ID NO: 346 - DNA, 23 bp, Artificial Sequence
  human ApoB siRNA sequence
gaagaggaaatgctggaaaatgt

SEQ ID NO: 347 - DNA, 23 bp, Artificial Sequence
  human ApoB siRNA sequence
aagaggaaatgctggaaaatgtc

SEQ ID NO: 348 - DNA, 23 bp, Artificial Sequence
  human ApoB siRNA sequence
agaggaaatgctggaaaatgtca

SEQ ID NO: 349 - DNA, 23 bp, Artificial Sequence
  human ApoB siRNA sequence
gaggaaatgctggaaaatgtcag

SEQ ID NO: 350 - DNA, 23 bp, Artificial Sequence
  human ApoB siRNA sequence
aggaaatgctggaaaatgtcagc

SEQ ID NO: 351 - DNA, 23 bp, Artificial Sequence
  human ApoB siRNA sequence
ggaaatgctggaaaatgtcagcc

SEQ ID NO: 352 - DNA, 23 bp, Artificial Sequence
  human ApoB siRNA sequence
gaaatgctggaaaatgtcagcct

SEQ ID NO: 353 - DNA, 23 bp, Artificial Sequence
  human ApoB siRNA sequence
aaatgctggaaaatgtcagcctg

SEQ ID NO: 354 - DNA, 23 bp, Artificial Sequence
  human ApoB siRNA sequence
aatgctggaaaatgtcagcctgg

SEQ ID NO: 355 - DNA, 23 bp, Artificial Sequence
  human ApoB siRNA sequence
atgctggaaaatgtcagcctggt

SEQ ID NO: 356 - DNA, 23 bp, Artificial Sequence
  human ApoB siRNA sequence
tgctggaaaatgtcagcctggtc

SEQ ID NO: 357 - DNA, 23 bp, Artificial Sequence
  human ApoB siRNA sequence
gctggaaaatgtcagcctggtct

SEQ ID NO: 358 - DNA, 23 bp, Artificial Sequence
  human ApoB siRNA sequence
ctggaaaatgtcagcctggtctg

SEQ ID NO: 359 - DNA, 23 bp, Artificial Sequence
  human ApoB siRNA sequence
tggaaaatgtcagcctggtctgt

SEQ ID NO: 360 - DNA, 23 bp, Artificial Sequence
  human ApoB siRNA sequence
ggaaaatgtcagcctggtctgtc

SEQ ID NO: 361 - DNA, 23 bp, Artificial Sequence
  human ApoB siRNA sequence
gaaaatgtcagcctggtctgtcc

SEQ ID NO: 362 - DNA, 23 bp, Artificial Sequence
  human ApoB siRNA sequence
aaaatgtcagcctggtctgtcca

SEQ ID NO: 363 - DNA, 23 bp, Artificial Sequence
  human ApoB siRNA sequence
aaatgtcagcctggtctgtccaa

SEQ ID NO: 364 - DNA, 23 bp, Artificial Sequence
  human ApoB siRNA sequence
aatgtcagcctggtctgtccaaa

SEQ ID NO: 365 - DNA, 23 bp, Artificial Sequence
  human ApoB siRNA sequence
atgtcagcctggtctgtccaaaa

SEQ ID NO: 366 - DNA, 23 bp, Artificial Sequence
  human ApoB siRNA sequence
tgtcagcctggtctgtccaaaag

SEQ ID NO: 367 - DNA, 23 bp, Artificial Sequence
  human ApoB siRNA sequence
gtcagcctggtctgtccaaaaga

SEQ ID NO: 368 - DNA, 23 bp, Artificial Sequence
  human ApoB siRNA sequence
tcagcctggtctgtccaaaagat

SEQ ID NO: 369 - DNA, 23 bp, Artificial Sequence
  human ApoB siRNA sequence
cagcctggtctgtccaaaagatg

SEQ ID NO: 370 - DNA, 23 bp, Artificial Sequence
  human ApoB siRNA sequence
agcctggtctgtccaaaagatgc

SEQ ID NO: 371 - DNA, 23 bp, Artificial Sequence
  human ApoB siRNA sequence
gcctggtctgtccaaaagatgcg

SEQ ID NO: 372 - DNA, 23 bp, Artificial Sequence
  human ApoB siRNA sequence
cctggtctgtccaaaagatgcga

SEQ ID NO: 373 - DNA, 23 bp, Artificial Sequence
  human ApoB siRNA sequence
ctggtctgtccaaaagatgcgac

SEQ ID NO: 374 - DNA, 23 bp, Artificial Sequence
  human ApoB siRNA sequence
tggtctgtccaaaagatgcgacc

SEQ ID NO: 375 - DNA, 23 bp, Artificial Sequence
  human ApoB siRNA sequence
ggtctgtccaaaagatgcgaccc

SEQ ID NO: 376 - DNA, 23 bp, Artificial Sequence
  human ApoB siRNA sequence
gtctgtccaaaagatgcgacccg

SEQ ID NO: 377 - DNA, 23 bp, Artificial Sequence
  human ApoB siRNA sequence
tctgtccaaaagatgcgacccga

SEQ ID NO: 378 - DNA, 23 bp, Artificial Sequence
  human ApoB siRNA sequence
ctgtccaaaagatgcgacccgat

SEQ ID NO: 379 - DNA, 23 bp, Artificial Sequence
  human ApoB siRNA sequence
tgtccaaaagatgcgacccgatt

SEQ ID NO: 380 - DNA, 23 bp, Artificial Sequence
  human ApoB siRNA sequence
gtccaaaagatgcgacccgattc

SEQ ID NO: 381 - DNA, 23 bp, Artificial Sequence
  human ApoB siRNA sequence
tccaaaagatgcgacccgattca

SEQ ID NO: 382 - DNA, 23 bp, Artificial Sequence
  human ApoB siRNA sequence
ccaaaagatgcgacccgattcaa

SEQ ID NO: 383 - DNA, 23 bp, Artificial Sequence
  human ApoB siRNA sequence
caaaagatgcgacccgattcaag

SEQ ID NO: 384 - DNA, 23 bp, Artificial Sequence
  human ApoB siRNA sequence
aaaagatgcgacccgattcaagc

SEQ ID NO: 385 - DNA, 23 bp, Artificial Sequence
  human ApoB siRNA sequence
aaagatgcgacccgattcaagca

SEQ ID NO: 386 - DNA, 23 bp, Artificial Sequence
  human ApoB siRNA sequence
aagatgcgacccgattcaagcac

SEQ ID NO: 387 - DNA, 23 bp, Artificial Sequence
  human ApoB siRNA sequence
agatgcgacccgattcaagcacc

SEQ ID NO: 388 - DNA, 23 bp, Artificial Sequence
  human ApoB siRNA sequence
gatgcgacccgattcaagcacct

SEQ ID NO: 389 - DNA, 23 bp, Artificial Sequence
  human ApoB siRNA sequence
atgcgacccgattcaagcacctc

SEQ ID NO: 390 - DNA, 23 bp, Artificial Sequence
  human ApoB siRNA sequence
tgcgacccgattcaagcacctcc

SEQ ID NO: 391 - DNA, 23 bp, Artificial Sequence
  human ApoB siRNA sequence
gcgacccgattcaagcacctccg

SEQ ID NO: 392 - DNA, 23 bp, Artificial Sequence
  human ApoB siRNA sequence
cgacccgattcaagcacctccgg

SEQ ID NO: 393 - DNA, 23 bp, Artificial Sequence
  human ApoB siRNA sequence
gacccgattcaagcacctccgga

SEQ ID NO: 394 - DNA, 23 bp, Artificial Sequence
  human ApoB siRNA sequence
acccgattcaagcacctccggaa

SEQ ID NO: 395 - DNA, 23 bp, Artificial Sequence
  human ApoB siRNA sequence
cccgattcaagcacctccggaag

SEQ ID NO: 396 - DNA, 23 bp, Artificial Sequence
  human ApoB siRNA sequence
ccgattcaagcacctccggaagt

SEQ ID NO: 397 - DNA, 23 bp, Artificial Sequence
  human ApoB siRNA sequence
cgattcaagcacctccggaagta

SEQ ID NO: 398 - DNA, 23 bp, Artificial Sequence
  human ApoB siRNA sequence
gattcaagcacctccggaagtac

SEQ ID NO: 399 - DNA, 23 bp, Artificial Sequence
  human ApoB siRNA sequence
attcaagcacctccggaagtaca

SEQ ID NO: 400 - DNA, 23 bp, Artificial Sequence
  human ApoB siRNA sequence
ttcaagcacctccggaagtacac

SEQ ID NO: 401 - DNA, 23 bp, Artificial Sequence
  human ApoB siRNA sequence
tcaagcacctccggaagtacaca

SEQ ID NO: 402 - DNA, 23 bp, Artificial Sequence
  human ApoB siRNA sequence
caagcacctccggaagtacacat

SEQ ID NO: 403 - DNA, 23 bp, Artificial Sequence
  human ApoB siRNA sequence
aagcacctccggaagtacacata

SEQ ID NO: 404 - DNA, 23 bp, Artificial Sequence
  human ApoB siRNA sequence
agcacctccggaagtacacatac

SEQ ID NO: 405 - DNA, 23 bp, Artificial Sequence
  human ApoB siRNA sequence
gcacctccggaagtacacataca

SEQ ID NO: 406 - DNA, 23 bp, Artificial Sequence
  human ApoB siRNA sequence
cacctccggaagtacacatacaa

SEQ ID NO: 407 - DNA, 23 bp, Artificial Sequence
  human ApoB siRNA sequence
acctccggaagtacacatacaac

SEQ ID NO: 408 - DNA, 23 bp, Artificial Sequence
  human ApoB siRNA sequence
cctccggaagtacacatacaact

SEQ ID NO: 409 - DNA, 23 bp, Artificial Sequence
  human ApoB siRNA sequence
ctccggaagtacacatacaacta

SEQ ID NO: 410 - DNA, 23 bp, Artificial Sequence
  human ApoB siRNA sequence
tccggaagtacacatacaactat

SEQ ID NO: 411 - DNA, 23 bp, Artificial Sequence
  human ApoB siRNA sequence
ccggaagtacacatacaactatg

SEQ ID NO: 412 - DNA, 23 bp, Artificial Sequence
  human ApoB siRNA sequence
cggaagtacacatacaactatga

SEQ ID NO: 413 - DNA, 23 bp, Artificial Sequence
  human ApoB siRNA sequence
ggaagtacacatacaactatgag

SEQ ID NO: 414 - DNA, 23 bp, Artificial Sequence
  human ApoB siRNA sequence
gaagtacacatacaactatgagg

SEQ ID NO: 415 - DNA, 23 bp, Artificial Sequence
  human ApoB siRNA sequence
aagtacacatacaactatgaggc

SEQ ID NO: 416 - DNA, 23 bp, Artificial Sequence
  human ApoB siRNA sequence
agtacacatacaactatgaggct

SEQ ID NO: 417 - DNA, 23 bp, Artificial Sequence
  human ApoB siRNA sequence
gtacacatacaactatgaggctg

SEQ ID NO: 418 - DNA, 23 bp, Artificial Sequence
  human ApoB siRNA sequence
tacacatacaactatgaggctga

SEQ ID NO: 419 - DNA, 23 bp, Artificial Sequence
  human ApoB siRNA sequence
acacatacaactatgaggctgag

SEQ ID NO: 420 - DNA, 23 bp, Artificial Sequence
  human ApoB siRNA sequence
cacatacaactatgaggctgaga

SEQ ID NO: 421 - DNA, 23 bp, Artificial Sequence
  human ApoB siRNA sequence
acatacaactatgaggctgagag

SEQ ID NO: 422 - DNA, 23 bp, Artificial Sequence
  human ApoB siRNA sequence
catacaactatgaggctgagagt

SEQ ID NO: 423 - DNA, 23 bp, Artificial Sequence
  human ApoB siRNA sequence
atacaactatgaggctgagagtt

SEQ ID NO: 424 - DNA, 23 bp, Artificial Sequence
  human ApoB siRNA sequence
tacaactatgaggctgagagttc

SEQ ID NO: 425 - DNA, 23 bp, Artificial Sequence
  human ApoB siRNA sequence
acaactatgaggctgagagttcc

SEQ ID NO: 426 - DNA, 23 bp, Artificial Sequence
  human ApoB siRNA sequence
caactatgaggctgagagttcca

SEQ ID NO: 427 - DNA, 23 bp, Artificial Sequence
  human ApoB siRNA sequence
aactatgaggctgagagttccag

SEQ ID NO: 428 - DNA, 23 bp, Artificial Sequence
  human ApoB siRNA sequence
actatgaggctgagagttccagt

SEQ ID NO: 429 - DNA, 23 bp, Artificial Sequence
  human ApoB siRNA sequence
ctatgaggctgagagttccagtg

SEQ ID NO: 430 - DNA, 23 bp, Artificial Sequence
  human ApoB siRNA sequence
tatgaggctgagagttccagtgg

SEQ ID NO: 431 - DNA, 23 bp, Artificial Sequence
  human ApoB siRNA sequence
atgaggctgagagttccagtgga

SEQ ID NO: 432 - DNA, 23 bp, Artificial Sequence
  human ApoB siRNA sequence
tgaggctgagagttccagtggag

SEQ ID NO: 433 - DNA, 23 bp, Artificial Sequence
  human ApoB siRNA sequence
gaggctgagagttccagtggagt

SEQ ID NO: 434 - DNA, 23 bp, Artificial Sequence
  human ApoB siRNA sequence
aggctgagagttccagtggagtc

SEQ ID NO: 435 - DNA, 23 bp, Artificial Sequence
  human ApoB siRNA sequence
ggctgagagttccagtggagtcc

SEQ ID NO: 436 - DNA, 23 bp, Artificial Sequence
  human ApoB siRNA sequence
gctgagagttccagtggagtccc

SEQ ID NO: 437 - DNA, 23 bp, Artificial Sequence
  human ApoB siRNA sequence
ctgagagttccagtggagtccct

SEQ ID NO: 438 - DNA, 23 bp, Artificial Sequence
  human ApoB siRNA sequence
tgagagttccagtggagtccctg

SEQ ID NO: 439 - DNA, 23 bp, Artificial Sequence
  human ApoB siRNA sequence
gagagttccagtggagtccctgg

SEQ ID NO: 440 - DNA, 23 bp, Artificial Sequence
  human ApoB siRNA sequence
agagttccagtggagtccctggg

SEQ ID NO: 441 - DNA, 23 bp, Artificial Sequence
  human ApoB siRNA sequence
gagttccagtggagtccctggga

SEQ ID NO: 442 - DNA, 23 bp, Artificial Sequence
  human ApoB siRNA sequence
agttccagtggagtccctgggac

SEQ ID NO: 443 - DNA, 23 bp, Artificial Sequence
  human ApoB siRNA sequence
gttccagtggagtccctgggact

SEQ ID NO: 444 - DNA, 23 bp, Artificial Sequence
  human ApoB siRNA sequence
ttccagtggagtccctgggactg

SEQ ID NO: 445 - DNA, 23 bp, Artificial Sequence
  human ApoB siRNA sequence
tccagtggagtccctgggactgc

SEQ ID NO: 446 - DNA, 23 bp, Artificial Sequence
  human ApoB siRNA sequence
ccagtggagtccctgggactgct

SEQ ID NO: 447 - DNA, 23 bp, Artificial Sequence
  human ApoB siRNA sequence
cagtggagtccctgggactgctg

SEQ ID NO: 448 - DNA, 23 bp, Artificial Sequence
  human ApoB siRNA sequence
agtggagtccctgggactgctga

SEQ ID NO: 449 - DNA, 23 bp, Artificial Sequence
  human ApoB siRNA sequence
gtggagtccctgggactgctgat

SEQ ID NO: 450 - DNA, 23 bp, Artificial Sequence
  human ApoB siRNA sequence
tggagtccctgggactgctgatt

SEQ ID NO: 451 - DNA, 23 bp, Artificial Sequence
  human ApoB siRNA sequence
ggagtccctgggactgctgattc

SEQ ID NO: 452 - DNA, 23 bp, Artificial Sequence
  human ApoB siRNA sequence
gagtccctgggactgctgattca

SEQ ID NO: 453 - DNA, 23 bp, Artificial Sequence
  human ApoB siRNA sequence
agtccctgggactgctgattcaa

SEQ ID NO: 454 - DNA, 23 bp, Artificial Sequence
  human ApoB siRNA sequence
gtccctgggactgctgattcaag

SEQ ID NO: 455 - DNA, 23 bp, Artificial Sequence
  human ApoB siRNA sequence
tccctgggactgctgattcaaga

SEQ ID NO: 456 - DNA, 23 bp, Artificial Sequence
  human ApoB siRNA sequence
ccctgggactgctgattcaagaa

SEQ ID NO: 457 - DNA, 23 bp, Artificial Sequence
  human ApoB siRNA sequence
cctgggactgctgattcaagaag

SEQ ID NO: 458 - DNA, 23 bp, Artificial Sequence
  human ApoB siRNA sequence
ctgggactgctgattcaagaagt

SEQ ID NO: 459 - DNA, 23 bp, Artificial Sequence
  human ApoB siRNA sequence
tgggactgctgattcaagaagtg

SEQ ID NO: 460 - DNA, 23 bp, Artificial Sequence
  human ApoB siRNA sequence
gggactgctgattcaagaagtgc

SEQ ID NO: 461 - DNA, 23 bp, Artificial Sequence
  human ApoB siRNA sequence
ggactgctgattcaagaagtgcc

SEQ ID NO: 462 - DNA, 23 bp, Artificial Sequence
  human ApoB siRNA sequence
gactgctgattcaagaagtgcca

SEQ ID NO: 463 - DNA, 23 bp, Artificial Sequence
  human ApoB siRNA sequence
actgctgattcaagaagtgccac

SEQ ID NO: 464 - DNA, 23 bp, Artificial Sequence
  human ApoB siRNA sequence
ctgctgattcaagaagtgccacc

SEQ ID NO: 465 - DNA, 23 bp, Artificial Sequence
  human ApoB siRNA sequence
tgctgattcaagaagtgccacca

SEQ ID NO: 466 - DNA, 23 bp, Artificial Sequence
  human ApoB siRNA sequence
gctgattcaagaagtgccaccag

SEQ ID NO: 467 - DNA, 23 bp, Artificial Sequence
  human ApoB siRNA sequence
ctgattcaagaagtgccaccagg

SEQ ID NO: 468 - DNA, 23 bp, Artificial Sequence
  human ApoB siRNA sequence
tgattcaagaagtgccaccagga

SEQ ID NO: 469 - DNA, 23 bp, Artificial Sequence
  human ApoB siRNA sequence
gattcaagaagtgccaccaggat

SEQ ID NO: 470 - DNA, 23 bp, Artificial Sequence
  human ApoB siRNA sequence
attcaagaagtgccaccaggatc

SEQ ID NO: 471 - DNA, 23 bp, Artificial Sequence
  human ApoB siRNA sequence
ttcaagaagtgccaccaggatca

SEQ ID NO: 472 - DNA, 23 bp, Artificial Sequence
  human ApoB siRNA sequence
tcaagaagtgccaccaggatcaa

SEQ ID NO: 473 - DNA, 23 bp, Artificial Sequence
  human ApoB siRNA sequence
caagaagtgccaccaggatcaac

SEQ ID NO: 474 - DNA, 23 bp, Artificial Sequence
  human ApoB siRNA sequence
aagaagtgccaccaggatcaact

SEQ ID NO: 475 - DNA, 23 bp, Artificial Sequence
  human ApoB siRNA sequence
agaagtgccaccaggatcaactg

SEQ ID NO: 476 - DNA, 23 bp, Artificial Sequence
  human ApoB siRNA sequence
gaagtgccaccaggatcaactgc

SEQ ID NO: 477 - DNA, 23 bp, Artificial Sequence
  human ApoB siRNA sequence
aagtgccaccaggatcaactgca

SEQ ID NO: 478 - DNA, 23 bp, Artificial Sequence
  human ApoB siRNA sequence
agtgccaccaggatcaactgcaa

SEQ ID NO: 479 - DNA, 23 bp, Artificial Sequence
  human ApoB siRNA sequence
gtgccaccaggatcaactgcaag

SEQ ID NO: 480 - DNA, 23 bp, Artificial Sequence
  human ApoB siRNA sequence
tgccaccaggatcaactgcaagg

SEQ ID NO: 481 - DNA, 23 bp, Artificial Sequence
  human ApoB siRNA sequence
gccaccaggatcaactgcaaggt

SEQ ID NO: 482 - DNA, 23 bp, Artificial Sequence
  human ApoB siRNA sequence
ccaccaggatcaactgcaaggtt

SEQ ID NO: 483 - DNA, 23 bp, Artificial Sequence
  human ApoB siRNA sequence
caccaggatcaactgcaaggttg

SEQ ID NO: 484 - DNA, 23 bp, Artificial Sequence
  human ApoB siRNA sequence
accaggatcaactgcaaggttga

SEQ ID NO: 485 - DNA, 23 bp, Artificial Sequence
  human ApoB siRNA sequence
ccaggatcaactgcaaggttgag

SEQ ID NO: 486 - DNA, 23 bp, Artificial Sequence
  human ApoB siRNA sequence
caggatcaactgcaaggttgagc

SEQ ID NO: 487 - DNA, 23 bp, Artificial Sequence
  human ApoB siRNA sequence
aggatcaactgcaaggttgagct

SEQ ID NO: 488 - DNA, 23 bp, Artificial Sequence
  human ApoB siRNA sequence
ggatcaactgcaaggttgagctg

SEQ ID NO: 489 - DNA, 23 bp, Artificial Sequence
  human ApoB siRNA sequence
gatcaactgcaaggttgagctgg

SEQ ID NO: 490 - DNA, 23 bp, Artificial Sequence
  human ApoB siRNA sequence
atcaactgcaaggttgagctgga

SEQ ID NO: 491 - DNA, 23 bp, Artificial Sequence
  human ApoB siRNA sequence
tcaactgcaaggttgagctggag

SEQ ID NO: 492 - DNA, 23 bp, Artificial Sequence
  human ApoB siRNA sequence
caactgcaaggttgagctggagg

SEQ ID NO: 493 - DNA, 23 bp, Artificial Sequence
  human ApoB siRNA sequence
aactgcaaggttgagctggaggt

SEQ ID NO: 494 - DNA, 23 bp, Artificial Sequence
  human ApoB siRNA sequence
actgcaaggttgagctggaggtt

SEQ ID NO: 495 - DNA, 23 bp, Artificial Sequence
  human ApoB siRNA sequence
ctgcaaggttgagctggaggttc

SEQ ID NO: 496 - DNA, 23 bp, Artificial Sequence
  human ApoB siRNA sequence
tgcaaggttgagctggaggttcc

SEQ ID NO: 497 - DNA, 23 bp, Artificial Sequence
  human ApoB siRNA sequence
gcaaggttgagctggaggttccc

SEQ ID NO: 498 - DNA, 23 bp, Artificial Sequence
  human ApoB siRNA sequence
caaggttgagctggaggttcccc

SEQ ID NO: 499 - DNA, 23 bp, Artificial Sequence
  human ApoB siRNA sequence
aaggttgagctggaggttcccca

SEQ ID NO: 500 - DNA, 23 bp, Artificial Sequence
  human ApoB siRNA sequence
aggttgagctggaggttccccag

SEQ ID NO: 501 - DNA, 23 bp, Artificial Sequence
  human ApoB siRNA sequence
ggttgagctggaggttccccagc

SEQ ID NO: 502 - DNA, 23 bp, Artificial Sequence
  human ApoB siRNA sequence
gttgagctggaggttccccagct

SEQ ID NO: 503 - DNA, 23 bp, Artificial Sequence
  human ApoB siRNA sequence
ttgagctggaggttccccagctc

SEQ ID NO: 504 - DNA, 23 bp, Artificial Sequence
  human ApoB siRNA sequence
tgagctggaggttccccagctct

SEQ ID NO: 505 - DNA, 23 bp, Artificial Sequence
  human ApoB siRNA sequence
gagctggaggttccccagctctg

SEQ ID NO: 506 - DNA, 23 bp, Artificial Sequence
  human ApoB siRNA sequence
agctggaggttccccagctctgc

SEQ ID NO: 507 - DNA, 23 bp, Artificial Sequence
  human ApoB siRNA sequence
gctggaggttccccagctctgca

SEQ ID NO: 508 - DNA, 23 bp, Artificial Sequence
  human ApoB siRNA sequence
ctggaggttccccagctctgcag

SEQ ID NO: 509 - DNA, 23 bp, Artificial Sequence
  human ApoB siRNA sequence
tggaggttccccagctctgcagc

SEQ ID NO: 510 - DNA, 23 bp, Artificial Sequence
  human ApoB siRNA sequence
ggaggttccccagctctgcagct

SEQ ID NO: 511 - DNA, 23 bp, Artificial Sequence
  human ApoB siRNA sequence
gaggttccccagctctgcagctt

SEQ ID NO: 512 - DNA, 23 bp, Artificial Sequence
  human ApoB siRNA sequence
aggttccccagctctgcagcttc

SEQ ID NO: 513 - DNA, 23 bp, Artificial Sequence
  human ApoB siRNA sequence
ggttccccagctctgcagcttca

SEQ ID NO: 514 - DNA, 23 bp, Artificial Sequence
  human ApoB siRNA sequence
gttccccagctctgcagcttcat

SEQ ID NO: 515 - DNA, 23 bp, Artificial Sequence
  human ApoB siRNA sequence
ttccccagctctgcagcttcatc

SEQ ID NO: 516 - DNA, 23 bp, Artificial Sequence
  human ApoB siRNA sequence
tccccagctctgcagcttcatcc

SEQ ID NO: 517 - DNA, 23 bp, Artificial Sequence
  human ApoB siRNA sequence
ccccagctctgcagcttcatcct

SEQ ID NO: 518 - DNA, 23 bp, Artificial Sequence
  human ApoB siRNA sequence
cccagctctgcagcttcatcctg

SEQ ID NO: 519 - DNA, 23 bp, Artificial Sequence
  human ApoB siRNA sequence
ccagctctgcagcttcatcctga

SEQ ID NO: 520 - DNA, 23 bp, Artificial Sequence
  human ApoB siRNA sequence
cagctctgcagcttcatcctgaa

SEQ ID NO: 521 - DNA, 23 bp, Artificial Sequence
  human ApoB siRNA sequence
agctctgcagcttcatcctgaag

SEQ ID NO: 522 - DNA, 23 bp, Artificial Sequence
  human ApoB siRNA sequence
gctctgcagcttcatcctgaaga

SEQ ID NO: 523 - DNA, 23 bp, Artificial Sequence
  human ApoB siRNA sequence
ctctgcagcttcatcctgaagac

SEQ ID NO: 524 - DNA, 23 bp, Artificial Sequence
  human ApoB siRNA sequence
tctgcagcttcatcctgaagacc

SEQ ID NO: 525 - DNA, 23 bp, Artificial Sequence
  human ApoB siRNA sequence
ctgcagcttcatcctgaagacca

SEQ ID NO: 526 - DNA, 23 bp, Artificial Sequence
  human ApoB siRNA sequence
tgcagcttcatcctgaagaccag

SEQ ID NO: 527 - DNA, 23 bp, Artificial Sequence
  human ApoB siRNA sequence
gcagcttcatcctgaagaccagc

SEQ ID NO: 528 - DNA, 23 bp, Artificial Sequence
  human ApoB siRNA sequence
cagcttcatcctgaagaccagcc

SEQ ID NO: 529 - DNA, 23 bp, Artificial Sequence
  human ApoB siRNA sequence
agcttcatcctgaagaccagcca

SEQ ID NO: 530 - DNA, 23 bp, Artificial Sequence
  human ApoB siRNA sequence
gcttcatcctgaagaccagccag

SEQ ID NO: 531 - DNA, 23 bp, Artificial Sequence
  human ApoB siRNA sequence
cttcatcctgaagaccagccagt

SEQ ID NO: 532 - DNA, 23 bp, Artificial Sequence
  human ApoB siRNA sequence
ttcatcctgaagaccagccagtg

SEQ ID NO: 533 - DNA, 23 bp, Artificial Sequence
  human ApoB siRNA sequence
tcatcctgaagaccagccagtgc

SEQ ID NO: 534 - DNA, 23 bp, Artificial Sequence
  human ApoB siRNA sequence
catcctgaagaccagccagtgca

SEQ ID NO: 535 - DNA, 23 bp, Artificial Sequence
  human ApoB siRNA sequence
atcctgaagaccagccagtgcac

SEQ ID NO: 536 - DNA, 23 bp, Artificial Sequence
  human ApoB siRNA sequence
tcctgaagaccagccagtgcacc

SEQ ID NO: 537 - DNA, 23 bp, Artificial Sequence
  human ApoB siRNA sequence
cctgaagaccagccagtgcaccc

SEQ ID NO: 538 - DNA, 23 bp, Artificial Sequence
  human ApoB siRNA sequence
ctgaagaccagccagtgcaccct

SEQ ID NO: 539 - DNA, 23 bp, Artificial Sequence
  human ApoB siRNA sequence
tgaagaccagccagtgcaccctg

SEQ ID NO: 540 - DNA, 23 bp, Artificial Sequence
  human ApoB siRNA sequence
gaagaccagccagtgcaccctga

SEQ ID NO: 541 - DNA, 23 bp, Artificial Sequence
  human ApoB siRNA sequence
aagaccagccagtgcaccctgaa

SEQ ID NO: 542 - DNA, 23 bp, Artificial Sequence
  human ApoB siRNA sequence
agaccagccagtgcaccctgaaa

SEQ ID NO: 543 - DNA, 23 bp, Artificial Sequence
  human ApoB siRNA sequence
gaccagccagtgcaccctgaaag

SEQ ID NO: 544 - DNA, 23 bp, Artificial Sequence
  human ApoB siRNA sequence
accagccagtgcaccctgaaaga

SEQ ID NO: 545 - DNA, 23 bp, Artificial Sequence
  human ApoB siRNA sequence
ccagccagtgcaccctgaaagag

SEQ ID NO: 546 - DNA, 23 bp, Artificial Sequence
  human ApoB siRNA sequence
cagccagtgcaccctgaaagagg

SEQ ID NO: 547 - DNA, 23 bp, Artificial Sequence
  human ApoB siRNA sequence
agccagtgcaccctgaaagaggt

SEQ ID NO: 548 - DNA, 23 bp, Artificial Sequence
  human ApoB siRNA sequence
gccagtgcaccctgaaagaggtg

SEQ ID NO: 549 - DNA, 23 bp, Artificial Sequence
  human ApoB siRNA sequence
ccagtgcaccctgaaagaggtgt

SEQ ID NO: 550 - DNA, 23 bp, Artificial Sequence
  human ApoB siRNA sequence
cagtgcaccctgaaagaggtgta

SEQ ID NO: 551 - DNA, 23 bp, Artificial Sequence
  human ApoB siRNA sequence
agtgcaccctgaaagaggtgtat

SEQ ID NO: 552 - DNA, 23 bp, Artificial Sequence
  human ApoB siRNA sequence
gtgcaccctgaaagaggtgtatg

SEQ ID NO: 553 - DNA, 23 bp, Artificial Sequence
  human ApoB siRNA sequence
tgcaccctgaaagaggtgtatgg

SEQ ID NO: 554 - DNA, 23 bp, Artificial Sequence
  human ApoB siRNA sequence
gcaccctgaaagaggtgtatggc

SEQ ID NO: 555 - DNA, 23 bp, Artificial Sequence
  human ApoB siRNA sequence
caccctgaaagaggtgtatggct

SEQ ID NO: 556 - DNA, 23 bp, Artificial Sequence
  human ApoB siRNA sequence
accctgaaagaggtgtatggctt

SEQ ID NO: 557 - DNA, 23 bp, Artificial Sequence
  human ApoB siRNA sequence
ccctgaaagaggtgtatggcttc

SEQ ID NO: 558 - DNA, 23 bp, Artificial Sequence
  human ApoB siRNA sequence
cctgaaagaggtgtatggcttca

SEQ ID NO: 559 - DNA, 23 bp, Artificial Sequence
  human ApoB siRNA sequence
ctgaaagaggtgtatggcttcaa

SEQ ID NO: 560 - DNA, 23 bp, Artificial Sequence
  human ApoB siRNA sequence
tgaaagaggtgtatggcttcaac

SEQ ID NO: 561 - DNA, 23 bp, Artificial Sequence
  human ApoB siRNA sequence
gaaagaggtgtatggcttcaacc

SEQ ID NO: 562 - DNA, 23 bp, Artificial Sequence
  human ApoB siRNA sequence
aaagaggtgtatggcttcaaccc

SEQ ID NO: 563 - DNA, 23 bp, Artificial Sequence
  human ApoB siRNA sequence
aagaggtgtatggcttcaaccct

SEQ ID NO: 564 - DNA, 23 bp, Artificial Sequence
  human ApoB siRNA sequence
agaggtgtatggcttcaaccctg

SEQ ID NO: 565 - DNA, 23 bp, Artificial Sequence
  human ApoB siRNA sequence
gaggtgtatggcttcaaccctga

SEQ ID NO: 566 - DNA, 23 bp, Artificial Sequence
  human ApoB siRNA sequence
aggtgtatggcttcaaccctgag

SEQ ID NO: 567 - DNA, 23 bp, Artificial Sequence
  human ApoB siRNA sequence
ggtgtatggcttcaaccctgagg

SEQ ID NO: 568 - DNA, 23 bp, Artificial Sequence
  human ApoB siRNA sequence
gtgtatggcttcaaccctgaggg

SEQ ID NO: 569 - DNA, 23 bp, Artificial Sequence
  human ApoB siRNA sequence
tgtatggcttcaaccctgagggc

SEQ ID NO: 570 - DNA, 23 bp, Artificial Sequence
  human ApoB siRNA sequence
gtatggcttcaaccctgagggca

SEQ ID NO: 571 - DNA, 23 bp, Artificial Sequence
  human ApoB siRNA sequence
tatggcttcaaccctgagggcaa

SEQ ID NO: 572 - DNA, 23 bp, Artificial Sequence
  human ApoB siRNA sequence
atggcttcaaccctgagggcaaa

SEQ ID NO: 573 - DNA, 23 bp, Artificial Sequence
  human ApoB siRNA sequence
tggcttcaaccctgagggcaaag

SEQ ID NO: 574 - DNA, 23 bp, Artificial Sequence
  human ApoB siRNA sequence
ggcttcaaccctgagggcaaagc

SEQ ID NO: 575 - DNA, 23 bp, Artificial Sequence
  human ApoB siRNA sequence
gcttcaaccctgagggcaaagcc

SEQ ID NO: 576 - DNA, 23 bp, Artificial Sequence
  human ApoB siRNA sequence
cttcaaccctgagggcaaagcct

SEQ ID NO: 577 - DNA, 23 bp, Artificial Sequence
  human ApoB siRNA sequence
ttcaaccctgagggcaaagcctt

SEQ ID NO: 578 - DNA, 23 bp, Artificial Sequence
  human ApoB siRNA sequence
tcaaccctgagggcaaagccttg

SEQ ID NO: 579 - DNA, 23 bp, Artificial Sequence
  human ApoB siRNA sequence
caaccctgagggcaaagccttgc

SEQ ID NO: 580 - DNA, 23 bp, Artificial Sequence
  human ApoB siRNA sequence
aaccctgagggcaaagccttgct

SEQ ID NO: 581 - DNA, 23 bp, Artificial Sequence
  human ApoB siRNA sequence
accctgagggcaaagccttgctg

SEQ ID NO: 582 - DNA, 23 bp, Artificial Sequence
  human ApoB siRNA sequence
ccctgagggcaaagccttgctga

SEQ ID NO: 583 - DNA, 23 bp, Artificial Sequence
  human ApoB siRNA sequence
cctgagggcaaagccttgctgaa

SEQ ID NO: 584 - DNA, 23 bp, Artificial Sequence
  human ApoB siRNA sequence
ctgagggcaaagccttgctgaag

SEQ ID NO: 585 - DNA, 23 bp, Artificial Sequence
  human ApoB siRNA sequence
tgagggcaaagccttgctgaaga

SEQ ID NO: 586 - DNA, 23 bp, Artificial Sequence
  human ApoB siRNA sequence
gagggcaaagccttgctgaagaa

SEQ ID NO: 587 - DNA, 23 bp, Artificial Sequence
  human ApoB siRNA sequence
agggcaaagccttgctgaagaaa

SEQ ID NO: 588 - DNA, 23 bp, Artificial Sequence
  human ApoB siRNA sequence
gggcaaagccttgctgaagaaaa

SEQ ID NO: 589 - DNA, 23 bp, Artificial Sequence
  human ApoB siRNA sequence
ggcaaagccttgctgaagaaaac

SEQ ID NO: 590 - DNA, 23 bp, Artificial Sequence
  human ApoB siRNA sequence
gcaaagccttgctgaagaaaacc

SEQ ID NO: 591 - DNA, 23 bp, Artificial Sequence
  human ApoB siRNA sequence
caaagccttgctgaagaaaacca

SEQ ID NO: 592 - DNA, 23 bp, Artificial Sequence
  human ApoB siRNA sequence
aaagccttgctgaagaaaaccaa

SEQ ID NO: 593 - DNA, 23 bp, Artificial Sequence
  human ApoB siRNA sequence
aagccttgctgaagaaaaccaag

SEQ ID NO: 594 - DNA, 23 bp, Artificial Sequence
  human ApoB siRNA sequence
agccttgctgaagaaaaccaaga

SEQ ID NO: 595 - DNA, 23 bp, Artificial Sequence
  human ApoB siRNA sequence
gccttgctgaagaaaaccaagaa

SEQ ID NO: 596 - DNA, 23 bp, Artificial Sequence
  human ApoB siRNA sequence
ccttgctgaagaaaaccaagaac

SEQ ID NO: 597 - DNA, 23 bp, Artificial Sequence
  human ApoB siRNA sequence
cttgctgaagaaaaccaagaact

SEQ ID NO: 598 - DNA, 23 bp, Artificial Sequence
  human ApoB siRNA sequence
ttgctgaagaaaaccaagaactc

SEQ ID NO: 599 - DNA, 23 bp, Artificial Sequence
  human ApoB siRNA sequence
tgctgaagaaaaccaagaactct

SEQ ID NO: 600 - DNA, 23 bp, Artificial Sequence
  human ApoB siRNA sequence
gctgaagaaaaccaagaactctg

SEQ ID NO: 601 - DNA, 23 bp, Artificial Sequence
  human ApoB siRNA sequence
ctgaagaaaaccaagaactctga

SEQ ID NO: 602 - DNA, 23 bp, Artificial Sequence
  human ApoB siRNA sequence
tgaagaaaaccaagaactctgag

SEQ ID NO: 603 - DNA, 23 bp, Artificial Sequence
  human ApoB siRNA sequence
gaagaaaaccaagaactctgagg

SEQ ID NO: 604 - DNA, 23 bp, Artificial Sequence
  human ApoB siRNA sequence
aagaaaaccaagaactctgagga

SEQ ID NO: 605 - DNA, 23 bp, Artificial Sequence
  human ApoB siRNA sequence
agaaaaccaagaactctgaggag

SEQ ID NO: 606 - DNA, 23 bp, Artificial Sequence
  human ApoB siRNA sequence
gaaaaccaagaactctgaggagt

SEQ ID NO: 607 - DNA, 23 bp, Artificial Sequence
  human ApoB siRNA sequence
aaaaccaagaactctgaggagtt

SEQ ID NO: 608 - DNA, 23 bp, Artificial Sequence
  human ApoB siRNA sequence
aaaccaagaactctgaggagttt

SEQ ID NO: 609 - DNA, 23 bp, Artificial Sequence
  human ApoB siRNA sequence
aaccaagaactctgaggagtttg

SEQ ID NO: 610 - DNA, 23 bp, Artificial Sequence
  human ApoB siRNA sequence
accaagaactctgaggagtttgc

SEQ ID NO: 611 - DNA, 23 bp, Artificial Sequence
  human ApoB siRNA sequence
ccaagaactctgaggagtttgct

SEQ ID NO: 612 - DNA, 23 bp, Artificial Sequence
  human ApoB siRNA sequence
caagaactctgaggagtttgctg

SEQ ID NO: 613 - DNA, 23 bp, Artificial Sequence
  human ApoB siRNA sequence
aagaactctgaggagtttgctgc

SEQ ID NO: 614 - DNA, 23 bp, Artificial Sequence
  human ApoB siRNA sequence
agaactctgaggagtttgctgca

SEQ ID NO: 615 - DNA, 23 bp, Artificial Sequence
  human ApoB siRNA sequence
gaactctgaggagtttgctgcag

SEQ ID NO: 616 - DNA, 23 bp, Artificial Sequence
  human ApoB siRNA sequence
aactctgaggagtttgctgcagc

SEQ ID NO: 617 - DNA, 23 bp, Artificial Sequence
  human ApoB siRNA sequence
actctgaggagtttgctgcagcc

SEQ ID NO: 618 - DNA, 23 bp, Artificial Sequence
  human ApoB siRNA sequence
ctctgaggagtttgctgcagcca

SEQ ID NO: 619 - DNA, 23 bp, Artificial Sequence
  human ApoB siRNA sequence
tctgaggagtttgctgcagccat

SEQ ID NO: 620 - DNA, 23 bp, Artificial Sequence
  human ApoB siRNA sequence
ctgaggagtttgctgcagccatg

SEQ ID NO: 621 - DNA, 23 bp, Artificial Sequence
  human ApoB siRNA sequence
tgaggagtttgctgcagccatgt

SEQ ID NO: 622 - DNA, 23 bp, Artificial Sequence
  human ApoB siRNA sequence
gaggagtttgctgcagccatgtc

SEQ ID NO: 623 - DNA, 23 bp, Artificial Sequence
  human ApoB siRNA sequence
aggagtttgctgcagccatgtcc

SEQ ID NO: 624 - DNA, 23 bp, Artificial Sequence
  human ApoB siRNA sequence
ggagtttgctgcagccatgtcca

SEQ ID NO: 625 - DNA, 23 bp, Artificial Sequence
  human ApoB siRNA sequence
gagtttgctgcagccatgtccag

SEQ ID NO: 626 - DNA, 23 bp, Artificial Sequence
  human ApoB siRNA sequence
agtttgctgcagccatgtccagg

SEQ ID NO: 627 - DNA, 23 bp, Artificial Sequence
  human ApoB siRNA sequence
gtttgctgcagccatgtccaggt

SEQ ID NO: 628 - DNA, 23 bp, Artificial Sequence
  human ApoB siRNA sequence
tttgctgcagccatgtccaggta

SEQ ID NO: 629 - DNA, 23 bp, Artificial Sequence
  human ApoB siRNA sequence
ttgctgcagccatgtccaggtat

SEQ ID NO: 630 - DNA, 23 bp, Artificial Sequence
  human ApoB siRNA sequence
tgctgcagccatgtccaggtatg

SEQ ID NO: 631 - DNA, 23 bp, Artificial Sequence
  human ApoB siRNA sequence
gctgcagccatgtccaggtatga

SEQ ID NO: 632 - DNA, 23 bp, Artificial Sequence
  human ApoB siRNA sequence
ctgcagccatgtccaggtatgag

SEQ ID NO: 633 - DNA, 23 bp, Artificial Sequence
  human ApoB siRNA sequence
tgcagccatgtccaggtatgagc

SEQ ID NO: 634 - DNA, 23 bp, Artificial Sequence
  human ApoB siRNA sequence
gcagccatgtccaggtatgagct

SEQ ID NO: 635 - DNA, 23 bp, Artificial Sequence
  human ApoB siRNA sequence
cagccatgtccaggtatgagctc

SEQ ID NO: 636 - DNA, 23 bp, Artificial Sequence
  human ApoB siRNA sequence
agccatgtccaggtatgagctca

SEQ ID NO: 637 - DNA, 23 bp, Artificial Sequence
  human ApoB siRNA sequence
gccatgtccaggtatgagctcaa

SEQ ID NO: 638 - DNA, 23 bp, Artificial Sequence
  human ApoB siRNA sequence
ccatgtccaggtatgagctcaag

SEQ ID NO: 639 - DNA, 23 bp, Artificial Sequence
  human ApoB siRNA sequence
catgtccaggtatgagctcaagc

SEQ ID NO: 640 - DNA, 23 bp, Artificial Sequence
  human ApoB siRNA sequence
atgtccaggtatgagctcaagct

SEQ ID NO: 641 - DNA, 23 bp, Artificial Sequence
  human ApoB siRNA sequence
tgtccaggtatgagctcaagctg

SEQ ID NO: 642 - DNA, 23 bp, Artificial Sequence
  human ApoB siRNA sequence
gtccaggtatgagctcaagctgg

SEQ ID NO: 643 - DNA, 23 bp, Artificial Sequence
  human ApoB siRNA sequence
tccaggtatgagctcaagctggc

SEQ ID NO: 644 - DNA, 23 bp, Artificial Sequence
  human ApoB siRNA sequence
ccaggtatgagctcaagctggcc

SEQ ID NO: 645 - DNA, 23 bp, Artificial Sequence
  human ApoB siRNA sequence
caggtatgagctcaagctggcca

SEQ ID NO: 646 - DNA, 23 bp, Artificial Sequence
  human ApoB siRNA sequence
aggtatgagctcaagctggccat

SEQ ID NO: 647 - DNA, 23 bp, Artificial Sequence
  human ApoB siRNA sequence
ggtatgagctcaagctggccatt

SEQ ID NO: 648 - DNA, 23 bp, Artificial Sequence
  human ApoB siRNA sequence
gtatgagctcaagctggccattc

SEQ ID NO: 649 - DNA, 23 bp, Artificial Sequence
  human ApoB siRNA sequence
tatgagctcaagctggccattcc

SEQ ID NO: 650 - DNA, 23 bp, Artificial Sequence
  human ApoB siRNA sequence
atgagctcaagctggccattcca

SEQ ID NO: 651 - DNA, 23 bp, Artificial Sequence
  human ApoB siRNA sequence
tgagctcaagctggccattccag

SEQ ID NO: 652 - DNA, 23 bp, Artificial Sequence
  human ApoB siRNA sequence
gagctcaagctggccattccaga

SEQ ID NO: 653 - DNA, 23 bp, Artificial Sequence
  human ApoB siRNA sequence
agctcaagctggccattccagaa

SEQ ID NO: 654 - DNA, 23 bp, Artificial Sequence
  human ApoB siRNA sequence
gctcaagctggccattccagaag

SEQ ID NO: 655 - DNA, 23 bp, Artificial Sequence
  human ApoB siRNA sequence
ctcaagctggccattccagaagg

SEQ ID NO: 656 - DNA, 23 bp, Artificial Sequence
  human ApoB siRNA sequence
tcaagctggccattccagaaggg

SEQ ID NO: 657 - DNA, 23 bp, Artificial Sequence
  human ApoB siRNA sequence
caagctggccattccagaaggga

SEQ ID NO: 658 - DNA, 23 bp, Artificial Sequence
  human ApoB siRNA sequence
aagctggccattccagaagggaa

SEQ ID NO: 659 - DNA, 23 bp, Artificial Sequence
  human ApoB siRNA sequence
agctggccattccagaagggaag

SEQ ID NO: 660 - DNA, 23 bp, Artificial Sequence
  human ApoB siRNA sequence
gctggccattccagaagggaagc

SEQ ID NO: 661 - DNA, 23 bp, Artificial Sequence
  human ApoB siRNA sequence
ctggccattccagaagggaagca

SEQ ID NO: 662 - DNA, 23 bp, Artificial Sequence
  human ApoB siRNA sequence
tggccattccagaagggaagcag

SEQ ID NO: 663 - DNA, 23 bp, Artificial Sequence
  human ApoB siRNA sequence
ggccattccagaagggaagcagg

SEQ ID NO: 664 - DNA, 23 bp, Artificial Sequence
  human ApoB siRNA sequence
gccattccagaagggaagcaggt

SEQ ID NO: 665 - DNA, 23 bp, Artificial Sequence
  human ApoB siRNA sequence
ccattccagaagggaagcaggtt

SEQ ID NO: 666 - DNA, 23 bp, Artificial Sequence
  human ApoB siRNA sequence
cattccagaagggaagcaggttt

SEQ ID NO: 667 - DNA, 23 bp, Artificial Sequence
  human ApoB siRNA sequence
attccagaagggaagcaggtttt

SEQ ID NO: 668 - DNA, 23 bp, Artificial Sequence
  human ApoB siRNA sequence
ttccagaagggaagcaggttttc

SEQ ID NO: 669 - DNA, 23 bp, Artificial Sequence
  human ApoB siRNA sequence
tccagaagggaagcaggttttcc

SEQ ID NO: 670 - DNA, 23 bp, Artificial Sequence
  human ApoB siRNA sequence
ccagaagggaagcaggttttcct

SEQ ID NO: 671 - DNA, 23 bp, Artificial Sequence
  human ApoB siRNA sequence
cagaagggaagcaggttttcctt

SEQ ID NO: 672 - DNA, 23 bp, Artificial Sequence
  human ApoB siRNA sequence
agaagggaagcaggttttccttt

SEQ ID NO: 673 - DNA, 23 bp, Artificial Sequence
  human ApoB siRNA sequence
gaagggaagcaggttttccttta

SEQ ID NO: 674 - DNA, 23 bp, Artificial Sequence
  human ApoB siRNA sequence
aagggaagcaggttttcctttac

SEQ ID NO: 675 - DNA, 23 bp, Artificial Sequence
  human ApoB siRNA sequence
agggaagcaggttttcctttacc

SEQ ID NO: 676 - DNA, 23 bp, Artificial Sequence
  human ApoB siRNA sequence
gggaagcaggttttcctttaccc

SEQ ID NO: 677 - DNA, 23 bp, Artificial Sequence
  human ApoB siRNA sequence
ggaagcaggttttcctttacccg

SEQ ID NO: 678 - DNA, 23 bp, Artificial Sequence
  human ApoB siRNA sequence
gaagcaggttttcctttacccgg

SEQ ID NO: 679 - DNA, 23 bp, Artificial Sequence
  human ApoB siRNA sequence
aagcaggttttcctttacccgga

SEQ ID NO: 680 - DNA, 23 bp, Artificial Sequence
  human ApoB siRNA sequence
agcaggttttcctttacccggag

SEQ ID NO: 681 - DNA, 23 bp, Artificial Sequence
  human ApoB siRNA sequence
gcaggttttcctttacccggaga

SEQ ID NO: 682 - DNA, 23 bp, Artificial Sequence
  human ApoB siRNA sequence
caggttttcctttacccggagaa

SEQ ID NO: 683 - DNA, 23 bp, Artificial Sequence
  human ApoB siRNA sequence
aggttttcctttacccggagaaa

SEQ ID NO: 684 - DNA, 23 bp, Artificial Sequence
  human ApoB siRNA sequence
ggttttcctttacccggagaaag

SEQ ID NO: 685 - DNA, 23 bp, Artificial Sequence
  human ApoB siRNA sequence
gttttcctttacccggagaaaga

SEQ ID NO: 686 - DNA, 23 bp, Artificial Sequence
  human ApoB siRNA sequence
ttttcctttacccggagaaagat

SEQ ID NO: 687 - DNA, 23 bp, Artificial Sequence
  human ApoB siRNA sequence
tttcctttacccggagaaagatg

SEQ ID NO: 688 - DNA, 23 bp, Artificial Sequence
  human ApoB siRNA sequence
ttcctttacccggagaaagatga

SEQ ID NO: 689 - DNA, 23 bp, Artificial Sequence
  human ApoB siRNA sequence
tcctttacccggagaaagatgaa

SEQ ID NO: 690 - DNA, 23 bp, Artificial Sequence
  human ApoB siRNA sequence
cctttacccggagaaagatgaac

SEQ ID NO: 691 - DNA, 23 bp, Artificial Sequence
  human ApoB siRNA sequence
ctttacccggagaaagatgaacc

SEQ ID NO: 692 - DNA, 23 bp, Artificial Sequence
  human ApoB siRNA sequence
tttacccggagaaagatgaacct

SEQ ID NO: 693 - DNA, 23 bp, Artificial Sequence
  human ApoB siRNA sequence
ttacccggagaaagatgaaccta

SEQ ID NO: 694 - DNA, 23 bp, Artificial Sequence
  human ApoB siRNA sequence
tacccggagaaagatgaacctac

SEQ ID NO: 695 - DNA, 23 bp, Artificial Sequence
  human ApoB siRNA sequence
acccggagaaagatgaacctact

SEQ ID NO: 696 - DNA, 23 bp, Artificial Sequence
  human ApoB siRNA sequence
cccggagaaagatgaacctactt

SEQ ID NO: 697 - DNA, 23 bp, Artificial Sequence
  human ApoB siRNA sequence
ccggagaaagatgaacctactta

SEQ ID NO: 698 - DNA, 23 bp, Artificial Sequence
  human ApoB siRNA sequence
cggagaaagatgaacctacttac

SEQ ID NO: 699 - DNA, 23 bp, Artificial Sequence
  human ApoB siRNA sequence
ggagaaagatgaacctacttaca

SEQ ID NO: 700 - DNA, 23 bp, Artificial Sequence
  human ApoB siRNA sequence
gagaaagatgaacctacttacat

SEQ ID NO: 701 - DNA, 23 bp, Artificial Sequence
  human ApoB siRNA sequence
agaaagatgaacctacttacatc

SEQ ID NO: 702 - DNA, 23 bp, Artificial Sequence
  human ApoB siRNA sequence
gaaagatgaacctacttacatcc

SEQ ID NO: 703 - DNA, 23 bp, Artificial Sequence
  human ApoB siRNA sequence
aaagatgaacctacttacatcct

SEQ ID NO: 704 - DNA, 23 bp, Artificial Sequence
  human ApoB siRNA sequence
aagatgaacctacttacatcctg

SEQ ID NO: 705 - DNA, 23 bp, Artificial Sequence
  human ApoB siRNA sequence
agatgaacctacttacatcctga

SEQ ID NO: 706 - DNA, 23 bp, Artificial Sequence
  human ApoB siRNA sequence
gatgaacctacttacatcctgaa

SEQ ID NO: 707 - DNA, 23 bp, Artificial Sequence
  human ApoB siRNA sequence
atgaacctacttacatcctgaac

SEQ ID NO: 708 - DNA, 23 bp, Artificial Sequence
  human ApoB siRNA sequence
tgaacctacttacatcctgaaca

SEQ ID NO: 709 - DNA, 23 bp, Artificial Sequence
  human ApoB siRNA sequence
gaacctacttacatcctgaacat

SEQ ID NO: 710 - DNA, 23 bp, Artificial Sequence
  human ApoB siRNA sequence
aacctacttacatcctgaacatc

SEQ ID NO: 711 - DNA, 23 bp, Artificial Sequence
  human ApoB siRNA sequence
acctacttacatcctgaacatca

SEQ ID NO: 712 - DNA, 23 bp, Artificial Sequence
  human ApoB siRNA sequence
cctacttacatcctgaacatcaa

SEQ ID NO: 713 - DNA, 23 bp, Artificial Sequence
  human ApoB siRNA sequence
ctacttacatcctgaacatcaag

SEQ ID NO: 714 - DNA, 23 bp, Artificial Sequence
  human ApoB siRNA sequence
tacttacatcctgaacatcaaga

SEQ ID NO: 715 - DNA, 23 bp, Artificial Sequence
  human ApoB siRNA sequence
acttacatcctgaacatcaagag

SEQ ID NO: 716 - DNA, 23 bp, Artificial Sequence
  human ApoB siRNA sequence
cttacatcctgaacatcaagagg

SEQ ID NO: 717 - DNA, 23 bp, Artificial Sequence
  human ApoB siRNA sequence
ttacatcctgaacatcaagaggg

SEQ ID NO: 718 - DNA, 23 bp, Artificial Sequence
  human ApoB siRNA sequence
tacatcctgaacatcaagagggg

SEQ ID NO: 719 - DNA, 23 bp, Artificial Sequence
  human ApoB siRNA sequence
acatcctgaacatcaagaggggc

SEQ ID NO: 720 - DNA, 23 bp, Artificial Sequence
  human ApoB siRNA sequence
catcctgaacatcaagaggggca

SEQ ID NO: 721 - DNA, 23 bp, Artificial Sequence
  human ApoB siRNA sequence
atcctgaacatcaagaggggcat

SEQ ID NO: 722 - DNA, 23 bp, Artificial Sequence
  human ApoB siRNA sequence
tcctgaacatcaagaggggcatc

SEQ ID NO: 723 - DNA, 23 bp, Artificial Sequence
  human ApoB siRNA sequence
cctgaacatcaagaggggcatca

SEQ ID NO: 724 - DNA, 23 bp, Artificial Sequence
  human ApoB siRNA sequence
ctgaacatcaagaggggcatcat

SEQ ID NO: 725 - DNA, 23 bp, Artificial Sequence
  human ApoB siRNA sequence
tgaacatcaagaggggcatcatt

SEQ ID NO: 726 - DNA, 23 bp, Artificial Sequence
  human ApoB siRNA sequence
gaacatcaagaggggcatcattt

SEQ ID NO: 727 - DNA, 23 bp, Artificial Sequence
  human ApoB siRNA sequence
aacatcaagaggggcatcatttc

SEQ ID NO: 728 - DNA, 23 bp, Artificial Sequence
  human ApoB siRNA sequence
acatcaagaggggcatcatttct

SEQ ID NO: 729 - DNA, 23 bp, Artificial Sequence
  human ApoB siRNA sequence
catcaagaggggcatcatttctg

SEQ ID NO: 730 - DNA, 23 bp, Artificial Sequence
  human ApoB siRNA sequence
atcaagaggggcatcatttctgc

SEQ ID NO: 731 - DNA, 23 bp, Artificial Sequence
  human ApoB siRNA sequence
tcaagaggggcatcatttctgcc

SEQ ID NO: 732 - DNA, 23 bp, Artificial Sequence
  human ApoB siRNA sequence
caagaggggcatcatttctgccc

SEQ ID NO: 733 - DNA, 23 bp, Artificial Sequence
  human ApoB siRNA sequence
aagaggggcatcatttctgccct

SEQ ID NO: 734 - DNA, 23 bp, Artificial Sequence
  human ApoB siRNA sequence
agaggggcatcatttctgccctc

SEQ ID NO: 735 - DNA, 23 bp, Artificial Sequence
  human ApoB siRNA sequence
gaggggcatcatttctgccctcc

SEQ ID NO: 736 - DNA, 23 bp, Artificial Sequence
  human ApoB siRNA sequence
aggggcatcatttctgccctcct

SEQ ID NO: 737 - DNA, 23 bp, Artificial Sequence
  human ApoB siRNA sequence
ggggcatcatttctgccctcctg

SEQ ID NO: 738 - DNA, 23 bp, Artificial Sequence
  human ApoB siRNA sequence
gggcatcatttctgccctcctgg

SEQ ID NO: 739 - DNA, 23 bp, Artificial Sequence
  human ApoB siRNA sequence
ggcatcatttctgccctcctggt

SEQ ID NO: 740 - DNA, 23 bp, Artificial Sequence
  human ApoB siRNA sequence
gcatcatttctgccctcctggtt

SEQ ID NO: 741 - DNA, 23 bp, Artificial Sequence
  human ApoB siRNA sequence
catcatttctgccctcctggttc

SEQ ID NO: 742 - DNA, 23 bp, Artificial Sequence
  human ApoB siRNA sequence
atcatttctgccctcctggttcc

SEQ ID NO: 743 - DNA, 23 bp, Artificial Sequence
  human ApoB siRNA sequence
tcatttctgccctcctggttccc

SEQ ID NO: 744 - DNA, 23 bp, Artificial Sequence
  human ApoB siRNA sequence
catttctgccctcctggttcccc

SEQ ID NO: 745 - DNA, 23 bp, Artificial Sequence
  human ApoB siRNA sequence
atttctgccctcctggttccccc

SEQ ID NO: 746 - DNA, 23 bp, Artificial Sequence
  human ApoB siRNA sequence
tttctgccctcctggttccccca

SEQ ID NO: 747 - DNA, 23 bp, Artificial Sequence
  human ApoB siRNA sequence
ttctgccctcctggttcccccag

SEQ ID NO: 748 - DNA, 23 bp, Artificial Sequence
  human ApoB siRNA sequence
tctgccctcctggttcccccaga

SEQ ID NO: 749 - DNA, 23 bp, Artificial Sequence
  human ApoB siRNA sequence
ctgccctcctggttcccccagag

SEQ ID NO: 750 - DNA, 23 bp, Artificial Sequence
  human ApoB siRNA sequence
tgccctcctggttcccccagaga

SEQ ID NO: 751 - DNA, 23 bp, Artificial Sequence
  human ApoB siRNA sequence
gccctcctggttcccccagagac

SEQ ID NO: 752 - DNA, 23 bp, Artificial Sequence
  human ApoB siRNA sequence
ccctcctggttcccccagagaca

SEQ ID NO: 753 - DNA, 23 bp, Artificial Sequence
  human ApoB siRNA sequence
cctcctggttcccccagagacag

SEQ ID NO: 754 - DNA, 23 bp, Artificial Sequence
  human ApoB siRNA sequence
ctcctggttcccccagagacaga

SEQ ID NO: 755 - DNA, 23 bp, Artificial Sequence
  human ApoB siRNA sequence
tcctggttcccccagagacagaa

SEQ ID NO: 756 - DNA, 23 bp, Artificial Sequence
  human ApoB siRNA sequence
cctggttcccccagagacagaag

SEQ ID NO: 757 - DNA, 23 bp, Artificial Sequence
  human ApoB siRNA sequence
ctggttcccccagagacagaaga

SEQ ID NO: 758 - DNA, 23 bp, Artificial Sequence
  human ApoB siRNA sequence
tggttcccccagagacagaagaa

SEQ ID NO: 759 - DNA, 23 bp, Artificial Sequence
  human ApoB siRNA sequence
ggttcccccagagacagaagaag

SEQ ID NO: 760 - DNA, 23 bp, Artificial Sequence
  human ApoB siRNA sequence
gttcccccagagacagaagaagc

SEQ ID NO: 761 - DNA, 23 bp, Artificial Sequence
  human ApoB siRNA sequence
ttcccccagagacagaagaagcc

SEQ ID NO: 762 - DNA, 23 bp, Artificial Sequence
  human ApoB siRNA sequence
tcccccagagacagaagaagcca

SEQ ID NO: 763 - DNA, 23 bp, Artificial Sequence
  human ApoB siRNA sequence
cccccagagacagaagaagccaa

SEQ ID NO: 764 - DNA, 23 bp, Artificial Sequence
  human ApoB siRNA sequence
ccccagagacagaagaagccaag

SEQ ID NO: 765 - DNA, 23 bp, Artificial Sequence
  human ApoB siRNA sequence
cccagagacagaagaagccaagc

SEQ ID NO: 766 - DNA, 23 bp, Artificial Sequence
  human ApoB siRNA sequence
ccagagacagaagaagccaagca

SEQ ID NO: 767 - DNA, 23 bp, Artificial Sequence
  human ApoB siRNA sequence
cagagacagaagaagccaagcaa

SEQ ID NO: 768 - DNA, 23 bp, Artificial Sequence
  human ApoB siRNA sequence
agagacagaagaagccaagcaag

SEQ ID NO: 769 - DNA, 23 bp, Artificial Sequence
  human ApoB siRNA sequence
gagacagaagaagccaagcaagt

SEQ ID NO: 770 - DNA, 23 bp, Artificial Sequence
  human ApoB siRNA sequence
agacagaagaagccaagcaagtg

SEQ ID NO: 771 - DNA, 23 bp, Artificial Sequence
  human ApoB siRNA sequence
gacagaagaagccaagcaagtgt

SEQ ID NO: 772 - DNA, 23 bp, Artificial Sequence
  human ApoB siRNA sequence
acagaagaagccaagcaagtgtt

SEQ ID NO: 773 - DNA, 23 bp, Artificial Sequence
  human ApoB siRNA sequence
cagaagaagccaagcaagtgttg

SEQ ID NO: 774 - DNA, 23 bp, Artificial Sequence
  human ApoB siRNA sequence
agaagaagccaagcaagtgttgt

SEQ ID NO: 775 - DNA, 23 bp, Artificial Sequence
  human ApoB siRNA sequence
gaagaagccaagcaagtgttgtt

SEQ ID NO: 776 - DNA, 23 bp, Artificial Sequence
  human ApoB siRNA sequence
aagaagccaagcaagtgttgttt

SEQ ID NO: 777 - DNA, 23 bp, Artificial Sequence
  human ApoB siRNA sequence
agaagccaagcaagtgttgtttc

SEQ ID NO: 778 - DNA, 23 bp, Artificial Sequence
  human ApoB siRNA sequence
gaagccaagcaagtgttgtttct

SEQ ID NO: 779 - DNA, 23 bp, Artificial Sequence
  human ApoB siRNA sequence
aagccaagcaagtgttgtttctg

SEQ ID NO: 780 - DNA, 23 bp, Artificial Sequence
  human ApoB siRNA sequence
agccaagcaagtgttgtttctgg

SEQ ID NO: 781 - DNA, 23 bp, Artificial Sequence
  human ApoB siRNA sequence
gccaagcaagtgttgtttctgga

SEQ ID NO: 782 - DNA, 23 bp, Artificial Sequence
  human ApoB siRNA sequence
ccaagcaagtgttgtttctggat

SEQ ID NO: 783 - DNA, 23 bp, Artificial Sequence
  human ApoB siRNA sequence
caagcaagtgttgtttctggata

SEQ ID NO: 784 - DNA, 23 bp, Artificial Sequence
  human ApoB siRNA sequence
aagcaagtgttgtttctggatac

SEQ ID NO: 785 - DNA, 23 bp, Artificial Sequence
  human ApoB siRNA sequence
agcaagtgttgtttctggatacc

SEQ ID NO: 786 - DNA, 23 bp, Artificial Sequence
  human ApoB siRNA sequence
gcaagtgttgtttctggataccg

SEQ ID NO: 787 - DNA, 23 bp, Artificial Sequence
  human ApoB siRNA sequence
caagtgttgtttctggataccgt

SEQ ID NO: 788 - DNA, 23 bp, Artificial Sequence
  human ApoB siRNA sequence
aagtgttgtttctggataccgtg

SEQ ID NO: 789 - DNA, 23 bp, Artificial Sequence
  human ApoB siRNA sequence
agtgttgtttctggataccgtgt

SEQ ID NO: 790 - DNA, 23 bp, Artificial Sequence
  human ApoB siRNA sequence
gtgttgtttctggataccgtgta

SEQ ID NO: 791 - DNA, 23 bp, Artificial Sequence
  human ApoB siRNA sequence
tgttgtttctggataccgtgtat

SEQ ID NO: 792 - DNA, 23 bp, Artificial Sequence
  human ApoB siRNA sequence
gttgtttctggataccgtgtatg

SEQ ID NO: 793 - DNA, 23 bp, Artificial Sequence
  human ApoB siRNA sequence
ttgtttctggataccgtgtatgg

SEQ ID NO: 794 - DNA, 23 bp, Artificial Sequence
  human ApoB siRNA sequence
tgtttctggataccgtgtatgga

SEQ ID NO: 795 - DNA, 23 bp, Artificial Sequence
  human ApoB siRNA sequence
gtttctggataccgtgtatggaa

SEQ ID NO: 796 - DNA, 23 bp, Artificial Sequence
  human ApoB siRNA sequence
tttctggataccgtgtatggaaa

SEQ ID NO: 797 - DNA, 23 bp, Artificial Sequence
  human ApoB siRNA sequence
ttctggataccgtgtatggaaac

SEQ ID NO: 798 - DNA, 23 bp, Artificial Sequence
  human ApoB siRNA sequence
tctggataccgtgtatggaaact

SEQ ID NO: 799 - DNA, 23 bp, Artificial Sequence
  human ApoB siRNA sequence
ctggataccgtgtatggaaactg

SEQ ID NO: 800 - DNA, 23 bp, Artificial Sequence
  human ApoB siRNA sequence
tggataccgtgtatggaaactgc

SEQ ID NO: 801 - DNA, 23 bp, Artificial Sequence
  human ApoB siRNA sequence
ggataccgtgtatggaaactgct

SEQ ID NO: 802 - DNA, 23 bp, Artificial Sequence
  human ApoB siRNA sequence
gataccgtgtatggaaactgctc

SEQ ID NO: 803 - DNA, 23 bp, Artificial Sequence
  human ApoB siRNA sequence
ataccgtgtatggaaactgctcc

SEQ ID NO: 804 - DNA, 23 bp, Artificial Sequence
  human ApoB siRNA sequence
taccgtgtatggaaactgctcca

SEQ ID NO: 805 - DNA, 23 bp, Artificial Sequence
  human ApoB siRNA sequence
accgtgtatggaaactgctccac

SEQ ID NO: 806 - DNA, 23 bp, Artificial Sequence
  human ApoB siRNA sequence
ccgtgtatggaaactgctccact

SEQ ID NO: 807 - DNA, 23 bp, Artificial Sequence
  human ApoB siRNA sequence
cgtgtatggaaactgctccactc

SEQ ID NO: 808 - DNA, 23 bp, Artificial Sequence
  human ApoB siRNA sequence
gtgtatggaaactgctccactca

SEQ ID NO: 809 - DNA, 23 bp, Artificial Sequence
  human ApoB siRNA sequence
tgtatggaaactgctccactcac

SEQ ID NO: 810 - DNA, 23 bp, Artificial Sequence
  human ApoB siRNA sequence
gtatggaaactgctccactcact

SEQ ID NO: 811 - DNA, 23 bp, Artificial Sequence
  human ApoB siRNA sequence
tatggaaactgctccactcactt

SEQ ID NO: 812 - DNA, 23 bp, Artificial Sequence
  human ApoB siRNA sequence
atggaaactgctccactcacttt

SEQ ID NO: 813 - DNA, 23 bp, Artificial Sequence
  human ApoB siRNA sequence
tggaaactgctccactcacttta

SEQ ID NO: 814 - DNA, 23 bp, Artificial Sequence
  human ApoB siRNA sequence
ggaaactgctccactcactttac

SEQ ID NO: 815 - DNA, 23 bp, Artificial Sequence
  human ApoB siRNA sequence
gaaactgctccactcactttacc

SEQ ID NO: 816 - DNA, 23 bp, Artificial Sequence
  human ApoB siRNA sequence
aaactgctccactcactttaccg

SEQ ID NO: 817 - DNA, 23 bp, Artificial Sequence
  human ApoB siRNA sequence
aactgctccactcactttaccgt

SEQ ID NO: 818 - DNA, 23 bp, Artificial Sequence
  human ApoB siRNA sequence
actgctccactcactttaccgtc

SEQ ID NO: 819 - DNA, 23 bp, Artificial Sequence
  human ApoB siRNA sequence
ctgctccactcactttaccgtca

SEQ ID NO: 820 - DNA, 23 bp, Artificial Sequence
  human ApoB siRNA sequence
tgctccactcactttaccgtcaa

SEQ ID NO: 821 - DNA, 23 bp, Artificial Sequence
  human ApoB siRNA sequence
gctccactcactttaccgtcaag

SEQ ID NO: 822 - DNA, 23 bp, Artificial Sequence
  human ApoB siRNA sequence
ctccactcactttaccgtcaaga

SEQ ID NO: 823 - DNA, 23 bp, Artificial Sequence
  human ApoB siRNA sequence
tccactcactttaccgtcaagac

SEQ ID NO: 824 - DNA, 23 bp, Artificial Sequence
  human ApoB siRNA sequence
ccactcactttaccgtcaagacg

SEQ ID NO: 825 - DNA, 23 bp, Artificial Sequence
  human ApoB siRNA sequence
cactcactttaccgtcaagacga

SEQ ID NO: 826 - DNA, 23 bp, Artificial Sequence
  human ApoB siRNA sequence
actcactttaccgtcaagacgag

SEQ ID NO: 827 - DNA, 23 bp, Artificial Sequence
  human ApoB siRNA sequence
ctcactttaccgtcaagacgagg

SEQ ID NO: 828 - DNA, 23 bp, Artificial Sequence
  human ApoB siRNA sequence
tcactttaccgtcaagacgagga

SEQ ID NO: 829 - DNA, 23 bp, Artificial Sequence
  human ApoB siRNA sequence
cactttaccgtcaagacgaggaa

SEQ ID NO: 830 - DNA, 23 bp, Artificial Sequence
  human ApoB siRNA sequence
actttaccgtcaagacgaggaag

SEQ ID NO: 831 - DNA, 23 bp, Artificial Sequence
  human ApoB siRNA sequence
ctttaccgtcaagacgaggaagg

SEQ ID NO: 832 - DNA, 23 bp, Artificial Sequence
  human ApoB siRNA sequence
tttaccgtcaagacgaggaaggg

SEQ ID NO: 833 - DNA, 23 bp, Artificial Sequence
  human ApoB siRNA sequence
ttaccgtcaagacgaggaagggc

SEQ ID NO: 834 - DNA, 23 bp, Artificial Sequence
  human ApoB siRNA sequence
taccgtcaagacgaggaagggca

SEQ ID NO: 835 - DNA, 23 bp, Artificial Sequence
  human ApoB siRNA sequence
accgtcaagacgaggaagggcaa

SEQ ID NO: 836 - DNA, 23 bp, Artificial Sequence
  human ApoB siRNA sequence
ccgtcaagacgaggaagggcaat

SEQ ID NO: 837 - DNA, 23 bp, Artificial Sequence
  human ApoB siRNA sequence
cgtcaagacgaggaagggcaatg

SEQ ID NO: 838 - DNA, 23 bp, Artificial Sequence
  human ApoB siRNA sequence
gtcaagacgaggaagggcaatgt

SEQ ID NO: 839 - DNA, 23 bp, Artificial Sequence
  human ApoB siRNA sequence
tcaagacgaggaagggcaatgtg

SEQ ID NO: 840 - DNA, 23 bp, Artificial Sequence
  human ApoB siRNA sequence
caagacgaggaagggcaatgtgg

SEQ ID NO: 841 - DNA, 23 bp, Artificial Sequence
  human ApoB siRNA sequence
aagacgaggaagggcaatgtggc

SEQ ID NO: 842 - DNA, 23 bp, Artificial Sequence
  human ApoB siRNA sequence
agacgaggaagggcaatgtggca

SEQ ID NO: 843 - DNA, 23 bp, Artificial Sequence
  human ApoB siRNA sequence
gacgaggaagggcaatgtggcaa

SEQ ID NO: 844 - DNA, 23 bp, Artificial Sequence
  human ApoB siRNA sequence
acgaggaagggcaatgtggcaac

SEQ ID NO: 845 - DNA, 23 bp, Artificial Sequence
  human ApoB siRNA sequence
cgaggaagggcaatgtggcaaca

SEQ ID NO: 846 - DNA, 23 bp, Artificial Sequence
  human ApoB siRNA sequence
gaggaagggcaatgtggcaacag

SEQ ID NO: 847 - DNA, 23 bp, Artificial Sequence
  human ApoB siRNA sequence
aggaagggcaatgtggcaacaga

SEQ ID NO: 848 - DNA, 23 bp, Artificial Sequence
  human ApoB siRNA sequence
ggaagggcaatgtggcaacagaa

SEQ ID NO: 849 - DNA, 23 bp, Artificial Sequence
  human ApoB siRNA sequence
gaagggcaatgtggcaacagaaa

SEQ ID NO: 850 - DNA, 23 bp, Artificial Sequence
  human ApoB siRNA sequence
aagggcaatgtggcaacagaaat

SEQ ID NO: 851 - DNA, 23 bp, Artificial Sequence
  human ApoB siRNA sequence
agggcaatgtggcaacagaaata

SEQ ID NO: 852 - DNA, 23 bp, Artificial Sequence
  human ApoB siRNA sequence
gggcaatgtggcaacagaaatat

SEQ ID NO: 853 - DNA, 23 bp, Artificial Sequence
  human ApoB siRNA sequence
ggcaatgtggcaacagaaatatc

SEQ ID NO: 854 - DNA, 23 bp, Artificial Sequence
  human ApoB siRNA sequence
gcaatgtggcaacagaaatatcc

SEQ ID NO: 855 - DNA, 23 bp, Artificial Sequence
  human ApoB siRNA sequence
caatgtggcaacagaaatatcca

SEQ ID NO: 856 - DNA, 23 bp, Artificial Sequence
  human ApoB siRNA sequence
aatgtggcaacagaaatatccac

SEQ ID NO: 857 - DNA, 23 bp, Artificial Sequence
  human ApoB siRNA sequence
atgtggcaacagaaatatccact

SEQ ID NO: 858 - DNA, 23 bp, Artificial Sequence
  human ApoB siRNA sequence
tgtggcaacagaaatatccactg

SEQ ID NO: 859 - DNA, 23 bp, Artificial Sequence
  human ApoB siRNA sequence
gtggcaacagaaatatccactga

SEQ ID NO: 860 - DNA, 23 bp, Artificial Sequence
  human ApoB siRNA sequence
tggcaacagaaatatccactgaa

SEQ ID NO: 861 - DNA, 23 bp, Artificial Sequence
  human ApoB siRNA sequence
ggcaacagaaatatccactgaaa

SEQ ID NO: 862 - DNA, 23 bp, Artificial Sequence
  human ApoB siRNA sequence
gcaacagaaatatccactgaaag

SEQ ID NO: 863 - DNA, 23 bp, Artificial Sequence
  human ApoB siRNA sequence
caacagaaatatccactgaaaga

SEQ ID NO: 864 - DNA, 23 bp, Artificial Sequence
  human ApoB siRNA sequence
aacagaaatatccactgaaagag

SEQ ID NO: 865 - DNA, 23 bp, Artificial Sequence
  human ApoB siRNA sequence
acagaaatatccactgaaagaga

SEQ ID NO: 866 - DNA, 23 bp, Artificial Sequence
  human ApoB siRNA sequence
cagaaatatccactgaaagagac

SEQ ID NO: 867 - DNA, 23 bp, Artificial Sequence
  human ApoB siRNA sequence
agaaatatccactgaaagagacc

SEQ ID NO: 868 - DNA, 23 bp, Artificial Sequence
  human ApoB siRNA sequence
gaaatatccactgaaagagacct

SEQ ID NO: 869 - DNA, 23 bp, Artificial Sequence
  human ApoB siRNA sequence
aaatatccactgaaagagacctg

SEQ ID NO: 870 - DNA, 23 bp, Artificial Sequence
  human ApoB siRNA sequence
aatatccactgaaagagacctgg

SEQ ID NO: 871 - DNA, 23 bp, Artificial Sequence
  human ApoB siRNA sequence
atatccactgaaagagacctggg

SEQ ID NO: 872 - DNA, 23 bp, Artificial Sequence
  human ApoB siRNA sequence
tatccactgaaagagacctgggg

SEQ ID NO: 873 - DNA, 23 bp, Artificial Sequence
  human ApoB siRNA sequence
atccactgaaagagacctggggc

SEQ ID NO: 874 - DNA, 23 bp, Artificial Sequence
  human ApoB siRNA sequence
tccactgaaagagacctggggca

SEQ ID NO: 875 - DNA, 23 bp, Artificial Sequence
  human ApoB siRNA sequence
ccactgaaagagacctggggcag

SEQ ID NO: 876 - DNA, 23 bp, Artificial Sequence
  human ApoB siRNA sequence
cactgaaagagacctggggcagt

SEQ ID NO: 877 - DNA, 23 bp, Artificial Sequence
  human ApoB siRNA sequence
actgaaagagacctggggcagtg

SEQ ID NO: 878 - DNA, 23 bp, Artificial Sequence
  human ApoB siRNA sequence
ctgaaagagacctggggcagtgt

SEQ ID NO: 879 - DNA, 23 bp, Artificial Sequence
  human ApoB siRNA sequence
tgaaagagacctggggcagtgtg

SEQ ID NO: 880 - DNA, 23 bp, Artificial Sequence
  human ApoB siRNA sequence
gaaagagacctggggcagtgtga

SEQ ID NO: 881 - DNA, 23 bp, Artificial Sequence
  human ApoB siRNA sequence
aaagagacctggggcagtgtgat

SEQ ID NO: 882 - DNA, 23 bp, Artificial Sequence
  human ApoB siRNA sequence
aagagacctggggcagtgtgatc

SEQ ID NO: 883 - DNA, 23 bp, Artificial Sequence
  human ApoB siRNA sequence
agagacctggggcagtgtgatcg

SEQ ID NO: 884 - DNA, 23 bp, Artificial Sequence
  human ApoB siRNA sequence
gagacctggggcagtgtgatcgc

SEQ ID NO: 885 - DNA, 23 bp, Artificial Sequence
  human ApoB siRNA sequence
agacctggggcagtgtgatcgct

SEQ ID NO: 886 - DNA, 23 bp, Artificial Sequence
  human ApoB siRNA sequence
gacctggggcagtgtgatcgctt

SEQ ID NO: 887 - DNA, 23 bp, Artificial Sequence
  human ApoB siRNA sequence
acctggggcagtgtgatcgcttc

SEQ ID NO: 888 - DNA, 23 bp, Artificial Sequence
  human ApoB siRNA sequence
cctggggcagtgtgatcgcttca

SEQ ID NO: 889 - DNA, 23 bp, Artificial Sequence
  human ApoB siRNA sequence
ctggggcagtgtgatcgcttcaa

SEQ ID NO: 890 - DNA, 23 bp, Artificial Sequence
  human ApoB siRNA sequence
tggggcagtgtgatcgcttcaag

SEQ ID NO: 891 - DNA, 23 bp, Artificial Sequence
  human ApoB siRNA sequence
ggggcagtgtgatcgcttcaagc

SEQ ID NO: 892 - DNA, 23 bp, Artificial Sequence
  human ApoB siRNA sequence
gggcagtgtgatcgcttcaagcc

SEQ ID NO: 893 - DNA, 23 bp, Artificial Sequence
  human ApoB siRNA sequence
ggcagtgtgatcgcttcaagccc

SEQ ID NO: 894 - DNA, 23 bp, Artificial Sequence
  human ApoB siRNA sequence
gcagtgtgatcgcttcaagccca

SEQ ID NO: 895 - DNA, 23 bp, Artificial Sequence
  human ApoB siRNA sequence
cagtgtgatcgcttcaagcccat

SEQ ID NO: 896 - DNA, 23 bp, Artificial Sequence
  human ApoB siRNA sequence
agtgtgatcgcttcaagcccatc

SEQ ID NO: 897 - DNA, 23 bp, Artificial Sequence
  human ApoB siRNA sequence
gtgtgatcgcttcaagcccatcc

SEQ ID NO: 898 - DNA, 23 bp, Artificial Sequence
  human ApoB siRNA sequence
tgtgatcgcttcaagcccatccg

SEQ ID NO: 899 - DNA, 23 bp, Artificial Sequence
  human ApoB siRNA sequence
gtgatcgcttcaagcccatccgc

SEQ ID NO: 900 - DNA, 23 bp, Artificial Sequence
  human ApoB siRNA sequence
tgatcgcttcaagcccatccgca

SEQ ID NO: 901 - DNA, 23 bp, Artificial Sequence
  human ApoB siRNA sequence
gatcgcttcaagcccatccgcac

SEQ ID NO: 902 - DNA, 23 bp, Artificial Sequence
  human ApoB siRNA sequence
atcgcttcaagcccatccgcaca

SEQ ID NO: 903 - DNA, 23 bp, Artificial Sequence
  human ApoB siRNA sequence
tcgcttcaagcccatccgcacag

SEQ ID NO: 904 - DNA, 23 bp, Artificial Sequence
  human ApoB siRNA sequence
cgcttcaagcccatccgcacagg

SEQ ID NO: 905 - DNA, 23 bp, Artificial Sequence
  human ApoB siRNA sequence
gcttcaagcccatccgcacaggc

SEQ ID NO: 906 - DNA, 23 bp, Artificial Sequence
  human ApoB siRNA sequence
cttcaagcccatccgcacaggca

SEQ ID NO: 907 - DNA, 23 bp, Artificial Sequence
  human ApoB siRNA sequence
ttcaagcccatccgcacaggcat

SEQ ID NO: 908 - DNA, 23 bp, Artificial Sequence
  human ApoB siRNA sequence
tcaagcccatccgcacaggcatc

SEQ ID NO: 909 - DNA, 23 bp, Artificial Sequence
  human ApoB siRNA sequence
caagcccatccgcacaggcatca

SEQ ID NO: 910 - DNA, 23 bp, Artificial Sequence
  human ApoB siRNA sequence
aagcccatccgcacaggcatcag

SEQ ID NO: 911 - DNA, 23 bp, Artificial Sequence
  human ApoB siRNA sequence
agcccatccgcacaggcatcagc

SEQ ID NO: 912 - DNA, 23 bp, Artificial Sequence
  human ApoB siRNA sequence
gcccatccgcacaggcatcagcc

SEQ ID NO: 913 - DNA, 23 bp, Artificial Sequence
  human ApoB siRNA sequence
cccatccgcacaggcatcagccc

SEQ ID NO: 914 - DNA, 23 bp, Artificial Sequence
  human ApoB siRNA sequence
ccatccgcacaggcatcagccca

SEQ ID NO: 915 - DNA, 23 bp, Artificial Sequence
  human ApoB siRNA sequence
catccgcacaggcatcagcccac

SEQ ID NO: 916 - DNA, 23 bp, Artificial Sequence
  human ApoB siRNA sequence
atccgcacaggcatcagcccact

SEQ ID NO: 917 - DNA, 23 bp, Artificial Sequence
  human ApoB siRNA sequence
tccgcacaggcatcagcccactt

SEQ ID NO: 918 - DNA, 23 bp, Artificial Sequence
  human ApoB siRNA sequence
ccgcacaggcatcagcccacttg

SEQ ID NO: 919 - DNA, 23 bp, Artificial Sequence
  human ApoB siRNA sequence
cgcacaggcatcagcccacttgc

SEQ ID NO: 920 - DNA, 23 bp, Artificial Sequence
  human ApoB siRNA sequence
gcacaggcatcagcccacttgct

SEQ ID NO: 921 - DNA, 23 bp, Artificial Sequence
  human ApoB siRNA sequence
cacaggcatcagcccacttgctc

SEQ ID NO: 922 - DNA, 23 bp, Artificial Sequence
  human ApoB siRNA sequence
acaggcatcagcccacttgctct

SEQ ID NO: 923 - DNA, 23 bp, Artificial Sequence
  human ApoB siRNA sequence
caggcatcagcccacttgctctc

SEQ ID NO: 924 - DNA, 23 bp, Artificial Sequence
  human ApoB siRNA sequence
aggcatcagcccacttgctctca

SEQ ID NO: 925 - DNA, 23 bp, Artificial Sequence
  human ApoB siRNA sequence
ggcatcagcccacttgctctcat

SEQ ID NO: 926 - DNA, 23 bp, Artificial Sequence
  human ApoB siRNA sequence
gcatcagcccacttgctctcatc

SEQ ID NO: 927 - DNA, 23 bp, Artificial Sequence
  human ApoB siRNA sequence
catcagcccacttgctctcatca

SEQ ID NO: 928 - DNA, 23 bp, Artificial Sequence
  human ApoB siRNA sequence
atcagcccacttgctctcatcaa

SEQ ID NO: 929 - DNA, 23 bp, Artificial Sequence
  human ApoB siRNA sequence
tcagcccacttgctctcatcaaa

SEQ ID NO: 930 - DNA, 23 bp, Artificial Sequence
  human ApoB siRNA sequence
cagcccacttgctctcatcaaag

SEQ ID NO: 931 - DNA, 23 bp, Artificial Sequence
  human ApoB siRNA sequence
agcccacttgctctcatcaaagg

SEQ ID NO: 932 - DNA, 23 bp, Artificial Sequence
  human ApoB siRNA sequence
gcccacttgctctcatcaaaggc

SEQ ID NO: 933 - DNA, 23 bp, Artificial Sequence
  human ApoB siRNA sequence
cccacttgctctcatcaaaggca

SEQ ID NO: 934 - DNA, 23 bp, Artificial Sequence
  human ApoB siRNA sequence
ccacttgctctcatcaaaggcat

SEQ ID NO: 935 - DNA, 23 bp, Artificial Sequence
  human ApoB siRNA sequence
cacttgctctcatcaaaggcatg

SEQ ID NO: 936 - DNA, 23 bp, Artificial Sequence
  human ApoB siRNA sequence
acttgctctcatcaaaggcatga

SEQ ID NO: 937 - DNA, 23 bp, Artificial Sequence
  human ApoB siRNA sequence
cttgctctcatcaaaggcatgac

SEQ ID NO: 938 - DNA, 23 bp, Artificial Sequence
  human ApoB siRNA sequence
ttgctctcatcaaaggcatgacc

SEQ ID NO: 939 - DNA, 23 bp, Artificial Sequence
  human ApoB siRNA sequence
tgctctcatcaaaggcatgaccc

SEQ ID NO: 940 - DNA, 23 bp, Artificial Sequence
  human ApoB siRNA sequence
gctctcatcaaaggcatgacccg

SEQ ID NO: 941 - DNA, 23 bp, Artificial Sequence
  human ApoB siRNA sequence
ctctcatcaaaggcatgacccgc

SEQ ID NO: 942 - DNA, 23 bp, Artificial Sequence
  human ApoB siRNA sequence
tctcatcaaaggcatgacccgcc

SEQ ID NO: 943 - DNA, 23 bp, Artificial Sequence
  human ApoB siRNA sequence
ctcatcaaaggcatgacccgccc

SEQ ID NO: 944 - DNA, 23 bp, Artificial Sequence
  human ApoB siRNA sequence
tcatcaaaggcatgacccgcccc

SEQ ID NO: 945 - DNA, 23 bp, Artificial Sequence
  human ApoB siRNA sequence
catcaaaggcatgacccgcccct

SEQ ID NO: 946 - DNA, 23 bp, Artificial Sequence
  human ApoB siRNA sequence
atcaaaggcatgacccgcccctt

SEQ ID NO: 947 - DNA, 23 bp, Artificial Sequence
  human ApoB siRNA sequence
tcaaaggcatgacccgccccttg

SEQ ID NO: 948 - DNA, 23 bp, Artificial Sequence
  human ApoB siRNA sequence
caaaggcatgacccgccccttgt

SEQ ID NO: 949 - DNA, 23 bp, Artificial Sequence
  human ApoB siRNA sequence
aaaggcatgacccgccccttgtc

SEQ ID NO: 950 - DNA, 23 bp, Artificial Sequence
  human ApoB siRNA sequence
aaggcatgacccgccccttgtca

SEQ ID NO: 951 - DNA, 23 bp, Artificial Sequence
  human ApoB siRNA sequence
aggcatgacccgccccttgtcaa

SEQ ID NO: 952 - DNA, 23 bp, Artificial Sequence
  human ApoB siRNA sequence
ggcatgacccgccccttgtcaac

SEQ ID NO: 953 - DNA, 23 bp, Artificial Sequence
  human ApoB siRNA sequence
gcatgacccgccccttgtcaact

SEQ ID NO: 954 - DNA, 23 bp, Artificial Sequence
  human ApoB siRNA sequence
catgacccgccccttgtcaactc

SEQ ID NO: 955 - DNA, 23 bp, Artificial Sequence
  human ApoB siRNA sequence
atgacccgccccttgtcaactct

SEQ ID NO: 956 - DNA, 23 bp, Artificial Sequence
  human ApoB siRNA sequence
tgacccgccccttgtcaactctg

SEQ ID NO: 957 - DNA, 23 bp, Artificial Sequence
  human ApoB siRNA sequence
gacccgccccttgtcaactctga

SEQ ID NO: 958 - DNA, 23 bp, Artificial Sequence
  human ApoB siRNA sequence
acccgccccttgtcaactctgat

SEQ ID NO: 959 - DNA, 23 bp, Artificial Sequence
  human ApoB siRNA sequence
cccgccccttgtcaactctgatc

SEQ ID NO: 960 - DNA, 23 bp, Artificial Sequence
  human ApoB siRNA sequence
ccgccccttgtcaactctgatca

SEQ ID NO: 961 - DNA, 23 bp, Artificial Sequence
  human ApoB siRNA sequence
cgccccttgtcaactctgatcag

SEQ ID NO: 962 - DNA, 23 bp, Artificial Sequence
  human ApoB siRNA sequence
gccccttgtcaactctgatcagc

SEQ ID NO: 963 - DNA, 23 bp, Artificial Sequence
  human ApoB siRNA sequence
ccccttgtcaactctgatcagca

SEQ ID NO: 964 - DNA, 23 bp, Artificial Sequence
  human ApoB siRNA sequence
cccttgtcaactctgatcagcag

SEQ ID NO: 965 - DNA, 23 bp, Artificial Sequence
  human ApoB siRNA sequence
ccttgtcaactctgatcagcagc

SEQ ID NO: 966 - DNA, 23 bp, Artificial Sequence
  human ApoB siRNA sequence
cttgtcaactctgatcagcagca

SEQ ID NO: 967 - DNA, 23 bp, Artificial Sequence
  human ApoB siRNA sequence
ttgtcaactctgatcagcagcag

SEQ ID NO: 968 - DNA, 23 bp, Artificial Sequence
  human ApoB siRNA sequence
tgtcaactctgatcagcagcagc

SEQ ID NO: 969 - DNA, 23 bp, Artificial Sequence
  human ApoB siRNA sequence
gtcaactctgatcagcagcagcc

SEQ ID NO: 970 - DNA, 23 bp, Artificial Sequence
  human ApoB siRNA sequence
tcaactctgatcagcagcagcca

SEQ ID NO: 971 - DNA, 23 bp, Artificial Sequence
  human ApoB siRNA sequence
caactctgatcagcagcagccag

SEQ ID NO: 972 - DNA, 23 bp, Artificial Sequence
  human ApoB siRNA sequence
aactctgatcagcagcagccagt

SEQ ID NO: 973 - DNA, 23 bp, Artificial Sequence
  human ApoB siRNA sequence
actctgatcagcagcagccagtc

SEQ ID NO: 974 - DNA, 23 bp, Artificial Sequence
  human ApoB siRNA sequence
ctctgatcagcagcagccagtcc

SEQ ID NO: 975 - DNA, 23 bp, Artificial Sequence
  human ApoB siRNA sequence
tctgatcagcagcagccagtcct

SEQ ID NO: 976 - DNA, 23 bp, Artificial Sequence
  human ApoB siRNA sequence
ctgatcagcagcagccagtcctg

SEQ ID NO: 977 - DNA, 23 bp, Artificial Sequence
  human ApoB siRNA sequence
tgatcagcagcagccagtcctgt

SEQ ID NO: 978 - DNA, 23 bp, Artificial Sequence
  human ApoB siRNA sequence
gatcagcagcagccagtcctgtc

SEQ ID NO: 979 - DNA, 23 bp, Artificial Sequence
  human ApoB siRNA sequence
atcagcagcagccagtcctgtca

SEQ ID NO: 980 - DNA, 23 bp, Artificial Sequence
  human ApoB siRNA sequence
tcagcagcagccagtcctgtcag

SEQ ID NO: 981 - DNA, 23 bp, Artificial Sequence
  human ApoB siRNA sequence
cagcagcagccagtcctgtcagt

SEQ ID NO: 982 - DNA, 23 bp, Artificial Sequence
  human ApoB siRNA sequence
agcagcagccagtcctgtcagta

SEQ ID NO: 983 - DNA, 23 bp, Artificial Sequence
  human ApoB siRNA sequence
gcagcagccagtcctgtcagtac

SEQ ID NO: 984 - DNA, 23 bp, Artificial Sequence
  human ApoB siRNA sequence
cagcagccagtcctgtcagtaca

SEQ ID NO: 985 - DNA, 23 bp, Artificial Sequence
  human ApoB siRNA sequence
agcagccagtcctgtcagtacac

SEQ ID NO: 986 - DNA, 23 bp, Artificial Sequence
  human ApoB siRNA sequence
gcagccagtcctgtcagtacaca

SEQ ID NO: 987 - DNA, 23 bp, Artificial Sequence
  human ApoB siRNA sequence
cagccagtcctgtcagtacacac

SEQ ID NO: 988 - DNA, 23 bp, Artificial Sequence
  human ApoB siRNA sequence
agccagtcctgtcagtacacact

SEQ ID NO: 989 - DNA, 23 bp, Artificial Sequence
  human ApoB siRNA sequence
gccagtcctgtcagtacacactg

SEQ ID NO: 990 - DNA, 23 bp, Artificial Sequence
  human ApoB siRNA sequence
ccagtcctgtcagtacacactgg

SEQ ID NO: 991 - DNA, 23 bp, Artificial Sequence
  human ApoB siRNA sequence
cagtcctgtcagtacacactgga

SEQ ID NO: 992 - DNA, 23 bp, Artificial Sequence
  human ApoB siRNA sequence
agtcctgtcagtacacactggac

SEQ ID NO: 993 - DNA, 23 bp, Artificial Sequence
  human ApoB siRNA sequence
gtcctgtcagtacacactggacg

SEQ ID NO: 994 - DNA, 23 bp, Artificial Sequence
  human ApoB siRNA sequence
tcctgtcagtacacactggacgc

SEQ ID NO: 995 - DNA, 23 bp, Artificial Sequence
  human ApoB siRNA sequence
cctgtcagtacacactggacgct

SEQ ID NO: 996 - DNA, 23 bp, Artificial Sequence
  human ApoB siRNA sequence
ctgtcagtacacactggacgcta

SEQ ID NO: 997 - DNA, 23 bp, Artificial Sequence
  human ApoB siRNA sequence
tgtcagtacacactggacgctaa

SEQ ID NO: 998 - DNA, 23 bp, Artificial Sequence
  human ApoB siRNA sequence
gtcagtacacactggacgctaag

SEQ ID NO: 999 - DNA, 23 bp, Artificial Sequence
  human ApoB siRNA sequence
tcagtacacactggacgctaaga

SEQ ID NO: 1000 - DNA, 23 bp, Artificial Sequence
  human ApoB siRNA sequence
cagtacacactggacgctaagag

SEQ ID NO: 1001 - DNA, 23 bp, Artificial Sequence
  human ApoB siRNA sequence
agtacacactggacgctaagagg

SEQ ID NO: 1002 - DNA, 23 bp, Artificial Sequence
  human ApoB siRNA sequence
gtacacactggacgctaagagga

SEQ ID NO: 1003 - DNA, 23 bp, Artificial Sequence
  human ApoB siRNA sequence
tacacactggacgctaagaggaa

SEQ ID NO: 1004 - DNA, 23 bp, Artificial Sequence
  human ApoB siRNA sequence
acacactggacgctaagaggaag

SEQ ID NO: 1005 - DNA, 23 bp, Artificial Sequence
  human ApoB siRNA sequence
cacactggacgctaagaggaagc

SEQ ID NO: 1006 - DNA, 23 bp, Artificial Sequence
  human ApoB siRNA sequence
acactggacgctaagaggaagca

SEQ ID NO: 1007 - DNA, 23 bp, Artificial Sequence
  human ApoB siRNA sequence
cactggacgctaagaggaagcat

SEQ ID NO: 1008 - DNA, 23 bp, Artificial Sequence
  human ApoB siRNA sequence
actggacgctaagaggaagcatg

SEQ ID NO: 1009 - DNA, 23 bp, Artificial Sequence
  human ApoB siRNA sequence
ctggacgctaagaggaagcatgt

SEQ ID NO: 1010 - DNA, 23 bp, Artificial Sequence
  human ApoB siRNA sequence
tggacgctaagaggaagcatgtg

SEQ ID NO: 1011 - DNA, 23 bp, Artificial Sequence
  human ApoB siRNA sequence
ggacgctaagaggaagcatgtgg

SEQ ID NO: 1012 - DNA, 23 bp, Artificial Sequence
  human ApoB siRNA sequence
gacgctaagaggaagcatgtggc

SEQ ID NO: 1013 - DNA, 23 bp, Artificial Sequence
  human ApoB siRNA sequence
acgctaagaggaagcatgtggca

SEQ ID NO: 1014 - DNA, 23 bp, Artificial Sequence
  human ApoB siRNA sequence
cgctaagaggaagcatgtggcag

SEQ ID NO: 1015 - DNA, 23 bp, Artificial Sequence
  human ApoB siRNA sequence
gctaagaggaagcatgtggcaga

SEQ ID NO: 1016 - DNA, 23 bp, Artificial Sequence
  human ApoB siRNA sequence
ctaagaggaagcatgtggcagaa

SEQ ID NO: 1017 - DNA, 23 bp, Artificial Sequence
  human ApoB siRNA sequence
taagaggaagcatgtggcagaag

SEQ ID NO: 1018 - DNA, 23 bp, Artificial Sequence
  human ApoB siRNA sequence
aagaggaagcatgtggcagaagc

SEQ ID NO: 1019 - DNA, 23 bp, Artificial Sequence
  human ApoB siRNA sequence
agaggaagcatgtggcagaagcc

SEQ ID NO: 1020 - DNA, 23 bp, Artificial Sequence
  human ApoB siRNA sequence
gaggaagcatgtggcagaagcca

SEQ ID NO: 1021 - DNA, 23 bp, Artificial Sequence
  human ApoB siRNA sequence
aggaagcatgtggcagaagccat

SEQ ID NO: 1022 - DNA, 23 bp, Artificial Sequence
  human ApoB siRNA sequence
ggaagcatgtggcagaagccatc

SEQ ID NO: 1023 - DNA, 23 bp, Artificial Sequence
  human ApoB siRNA sequence
gaagcatgtggcagaagccatct

SEQ ID NO: 1024 - DNA, 23 bp, Artificial Sequence
  human ApoB siRNA sequence
aagcatgtggcagaagccatctg

SEQ ID NO: 1025 - DNA, 23 bp, Artificial Sequence
  human ApoB siRNA sequence
agcatgtggcagaagccatctgc

SEQ ID NO: 1026 - DNA, 23 bp, Artificial Sequence
  human ApoB siRNA sequence
gcatgtggcagaagccatctgca

SEQ ID NO: 1027 - DNA, 23 bp, Artificial Sequence
  human ApoB siRNA sequence
catgtggcagaagccatctgcaa

SEQ ID NO: 1028 - DNA, 23 bp, Artificial Sequence
  human ApoB siRNA sequence
atgtggcagaagccatctgcaag

SEQ ID NO: 1029 - DNA, 23 bp, Artificial Sequence
  human ApoB siRNA sequence
tgtggcagaagccatctgcaagg

SEQ ID NO: 1030 - DNA, 23 bp, Artificial Sequence
  human ApoB siRNA sequence
gtggcagaagccatctgcaagga

SEQ ID NO: 1031 - DNA, 23 bp, Artificial Sequence
  human ApoB siRNA sequence
tggcagaagccatctgcaaggag

SEQ ID NO: 1032 - DNA, 23 bp, Artificial Sequence
  human ApoB siRNA sequence
ggcagaagccatctgcaaggagc

SEQ ID NO: 1033 - DNA, 23 bp, Artificial Sequence
  human ApoB siRNA sequence
gcagaagccatctgcaaggagca

SEQ ID NO: 1034 - DNA, 23 bp, Artificial Sequence
  human ApoB siRNA sequence
cagaagccatctgcaaggagcaa

SEQ ID NO: 1035 - DNA, 23 bp, Artificial Sequence
  human ApoB siRNA sequence
agaagccatctgcaaggagcaac

SEQ ID NO: 1036 - DNA, 23 bp, Artificial Sequence
  human ApoB siRNA sequence
gaagccatctgcaaggagcaaca

SEQ ID NO: 1037 - DNA, 23 bp, Artificial Sequence
  human ApoB siRNA sequence
aagccatctgcaaggagcaacac

SEQ ID NO: 1038 - DNA, 23 bp, Artificial Sequence
  human ApoB siRNA sequence
agccatctgcaaggagcaacacc

SEQ ID NO: 1039 - DNA, 23 bp, Artificial Sequence
  human ApoB siRNA sequence
gccatctgcaaggagcaacacct

SEQ ID NO: 1040 - DNA, 23 bp, Artificial Sequence
  human ApoB siRNA sequence
ccatctgcaaggagcaacacctc

SEQ ID NO: 1041 - DNA, 23 bp, Artificial Sequence
  human ApoB siRNA sequence
catctgcaaggagcaacacctct

SEQ ID NO: 1042 - DNA, 23 bp, Artificial Sequence
  human ApoB siRNA sequence
atctgcaaggagcaacacctctt

SEQ ID NO: 1043 - DNA, 23 bp, Artificial Sequence
  human ApoB siRNA sequence
tctgcaaggagcaacacctcttc

SEQ ID NO: 1044 - DNA, 23 bp, Artificial Sequence
  human ApoB siRNA sequence
ctgcaaggagcaacacctcttcc

SEQ ID NO: 1045 - DNA, 23 bp, Artificial Sequence
  human ApoB siRNA sequence
tgcaaggagcaacacctcttcct

SEQ ID NO: 1046 - DNA, 23 bp, Artificial Sequence
  human ApoB siRNA sequence
gcaaggagcaacacctcttcctg

SEQ ID NO: 1047 - DNA, 23 bp, Artificial Sequence
  human ApoB siRNA sequence
caaggagcaacacctcttcctgc

SEQ ID NO: 1048 - DNA, 23 bp, Artificial Sequence
  human ApoB siRNA sequence
aaggagcaacacctcttcctgcc

SEQ ID NO: 1049 - DNA, 23 bp, Artificial Sequence
  human ApoB siRNA sequence
aggagcaacacctcttcctgcct

SEQ ID NO: 1050 - DNA, 23 bp, Artificial Sequence
  human ApoB siRNA sequence
ggagcaacacctcttcctgcctt

SEQ ID NO: 1051 - DNA, 23 bp, Artificial Sequence
  human ApoB siRNA sequence
gagcaacacctcttcctgccttt

SEQ ID NO: 1052 - DNA, 23 bp, Artificial Sequence
  human ApoB siRNA sequence
agcaacacctcttcctgcctttc

SEQ ID NO: 1053 - DNA, 23 bp, Artificial Sequence
  human ApoB siRNA sequence
gcaacacctcttcctgcctttct

SEQ ID NO: 1054 - DNA, 23 bp, Artificial Sequence
  human ApoB siRNA sequence
caacacctcttcctgcctttctc

SEQ ID NO: 1055 - DNA, 23 bp, Artificial Sequence
  human ApoB siRNA sequence
aacacctcttcctgcctttctcc

SEQ ID NO: 1056 - DNA, 23 bp, Artificial Sequence
  human ApoB siRNA sequence
acacctcttcctgcctttctcct

SEQ ID NO: 1057 - DNA, 23 bp, Artificial Sequence
  human ApoB siRNA sequence
cacctcttcctgcctttctccta

SEQ ID NO: 1058 - DNA, 23 bp, Artificial Sequence
  human ApoB siRNA sequence
acctcttcctgcctttctcctac

SEQ ID NO: 1059 - DNA, 23 bp, Artificial Sequence
  human ApoB siRNA sequence
cctcttcctgcctttctcctaca

SEQ ID NO: 1060 - DNA, 23 bp, Artificial Sequence
  human ApoB siRNA sequence
ctcttcctgcctttctcctacaa

SEQ ID NO: 1061 - DNA, 23 bp, Artificial Sequence
  human ApoB siRNA sequence
tcttcctgcctttctcctacaac

SEQ ID NO: 1062 - DNA, 23 bp, Artificial Sequence
  human ApoB siRNA sequence
cttcctgcctttctcctacaaca

SEQ ID NO: 1063 - DNA, 23 bp, Artificial Sequence
  human ApoB siRNA sequence
ttcctgcctttctcctacaacaa

SEQ ID NO: 1064 - DNA, 23 bp, Artificial Sequence
  human ApoB siRNA sequence
tcctgcctttctcctacaacaat

SEQ ID NO: 1065 - DNA, 23 bp, Artificial Sequence
  human ApoB siRNA sequence
cctgcctttctcctacaacaata

SEQ ID NO: 1066 - DNA, 23 bp, Artificial Sequence
  human ApoB siRNA sequence
ctgcctttctcctacaacaataa

SEQ ID NO: 1067 - DNA, 23 bp, Artificial Sequence
  human ApoB siRNA sequence
tgcctttctcctacaacaataag

SEQ ID NO: 1068 - DNA, 23 bp, Artificial Sequence
  human ApoB siRNA sequence
gcctttctcctacaacaataagt

SEQ ID NO: 1069 - DNA, 23 bp, Artificial Sequence
  human ApoB siRNA sequence
cctttctcctacaacaataagta

SEQ ID NO: 1070 - DNA, 23 bp, Artificial Sequence
  human ApoB siRNA sequence
ctttctcctacaacaataagtat

SEQ ID NO: 1071 - DNA, 23 bp, Artificial Sequence
  human ApoB siRNA sequence
tttctcctacaacaataagtatg

SEQ ID NO: 1072 - DNA, 23 bp, Artificial Sequence
  human ApoB siRNA sequence
ttctcctacaacaataagtatgg

SEQ ID NO: 1073 - DNA, 23 bp, Artificial Sequence
  human ApoB siRNA sequence
tctcctacaacaataagtatggg

SEQ ID NO: 1074 - DNA, 23 bp, Artificial Sequence
  human ApoB siRNA sequence
ctcctacaacaataagtatggga

SEQ ID NO: 1075 - DNA, 23 bp, Artificial Sequence
  human ApoB siRNA sequence
tcctacaacaataagtatgggat

SEQ ID NO: 1076 - DNA, 23 bp, Artificial Sequence
  human ApoB siRNA sequence
cctacaacaataagtatgggatg

SEQ ID NO: 1077 - DNA, 23 bp, Artificial Sequence
  human ApoB siRNA sequence
ctacaacaataagtatgggatgg

SEQ ID NO: 1078 - DNA, 23 bp, Artificial Sequence
  human ApoB siRNA sequence
tacaacaataagtatgggatggt

SEQ ID NO: 1079 - DNA, 23 bp, Artificial Sequence
  human ApoB siRNA sequence
acaacaataagtatgggatggta

SEQ ID NO: 1080 - DNA, 23 bp, Artificial Sequence
  human ApoB siRNA sequence
caacaataagtatgggatggtag

SEQ ID NO: 1081 - DNA, 23 bp, Artificial Sequence
  human ApoB siRNA sequence
aacaataagtatgggatggtagc

SEQ ID NO: 1082 - DNA, 23 bp, Artificial Sequence
  human ApoB siRNA sequence
acaataagtatgggatggtagca

SEQ ID NO: 1083 - DNA, 23 bp, Artificial Sequence
  human ApoB siRNA sequence
caataagtatgggatggtagcac

SEQ ID NO: 1084 - DNA, 23 bp, Artificial Sequence
  human ApoB siRNA sequence
aataagtatgggatggtagcaca

SEQ ID NO: 1085 - DNA, 23 bp, Artificial Sequence
  human ApoB siRNA sequence
ataagtatgggatggtagcacaa

SEQ ID NO: 1086 - DNA, 23 bp, Artificial Sequence
  human ApoB siRNA sequence
taagtatgggatggtagcacaag

SEQ ID NO: 1087 - DNA, 23 bp, Artificial Sequence
  human ApoB siRNA sequence
aagtatgggatggtagcacaagt

SEQ ID NO: 1088 - DNA, 23 bp, Artificial Sequence
  human ApoB siRNA sequence
agtatgggatggtagcacaagtg

SEQ ID NO: 1089 - DNA, 23 bp, Artificial Sequence
  human ApoB siRNA sequence
gtatgggatggtagcacaagtga

SEQ ID NO: 1090 - DNA, 23 bp, Artificial Sequence
  human ApoB siRNA sequence
tatgggatggtagcacaagtgac

SEQ ID NO: 1091 - DNA, 23 bp, Artificial Sequence
  human ApoB siRNA sequence
atgggatggtagcacaagtgaca

SEQ ID NO: 1092 - DNA, 23 bp, Artificial Sequence
  human ApoB siRNA sequence
tgggatggtagcacaagtgacac

SEQ ID NO: 1093 - DNA, 23 bp, Artificial Sequence
  human ApoB siRNA sequence
gggatggtagcacaagtgacaca

SEQ ID NO: 1094 - DNA, 23 bp, Artificial Sequence
  human ApoB siRNA sequence
ggatggtagcacaagtgacacag

SEQ ID NO: 1095 - DNA, 23 bp, Artificial Sequence
  human ApoB siRNA sequence
gatggtagcacaagtgacacaga

SEQ ID NO: 1096 - DNA, 23 bp, Artificial Sequence
  human ApoB siRNA sequence
atggtagcacaagtgacacagac

SEQ ID NO: 1097 - DNA, 23 bp, Artificial Sequence
  human ApoB siRNA sequence
tggtagcacaagtgacacagact

SEQ ID NO: 1098 - DNA, 23 bp, Artificial Sequence
  human ApoB siRNA sequence
ggtagcacaagtgacacagactt

SEQ ID NO: 1099 - DNA, 23 bp, Artificial Sequence
  human ApoB siRNA sequence
gtagcacaagtgacacagacttt

SEQ ID NO: 1100 - DNA, 23 bp, Artificial Sequence
  human ApoB siRNA sequence
tagcacaagtgacacagactttg

SEQ ID NO: 1101 - DNA, 23 bp, Artificial Sequence
  human ApoB siRNA sequence
agcacaagtgacacagactttga

SEQ ID NO: 1102 - DNA, 23 bp, Artificial Sequence
  human ApoB siRNA sequence
gcacaagtgacacagactttgaa

SEQ ID NO: 1103 - DNA, 23 bp, Artificial Sequence
  human ApoB siRNA sequence
cacaagtgacacagactttgaaa

SEQ ID NO: 1104 - DNA, 23 bp, Artificial Sequence
  human ApoB siRNA sequence
acaagtgacacagactttgaaac

SEQ ID NO: 1105 - DNA, 23 bp, Artificial Sequence
  human ApoB siRNA sequence
caagtgacacagactttgaaact

SEQ ID NO: 1106 - DNA, 23 bp, Artificial Sequence
  human ApoB siRNA sequence
aagtgacacagactttgaaactt

SEQ ID NO: 1107 - DNA, 23 bp, Artificial Sequence
  human ApoB siRNA sequence
agtgacacagactttgaaacttg

SEQ ID NO: 1108 - DNA, 23 bp, Artificial Sequence
  human ApoB siRNA sequence
gtgacacagactttgaaacttga

SEQ ID NO: 1109 - DNA, 23 bp, Artificial Sequence
  human ApoB siRNA sequence
tgacacagactttgaaacttgaa

SEQ ID NO: 1110 - DNA, 23 bp, Artificial Sequence
  human ApoB siRNA sequence
gacacagactttgaaacttgaag

SEQ ID NO: 1111 - DNA, 23 bp, Artificial Sequence
  human ApoB siRNA sequence
acacagactttgaaacttgaaga

SEQ ID NO: 1112 - DNA, 23 bp, Artificial Sequence
  human ApoB siRNA sequence
cacagactttgaaacttgaagac

SEQ ID NO: 1113 - DNA, 23 bp, Artificial Sequence
  human ApoB siRNA sequence
acagactttgaaacttgaagaca

SEQ ID NO: 1114 - DNA, 23 bp, Artificial Sequence
  human ApoB siRNA sequence
cagactttgaaacttgaagacac

SEQ ID NO: 1115 - DNA, 23 bp, Artificial Sequence
  human ApoB siRNA sequence
agactttgaaacttgaagacaca

SEQ ID NO: 1116 - DNA, 23 bp, Artificial Sequence
  human ApoB siRNA sequence
gactttgaaacttgaagacacac

SEQ ID NO: 1117 - DNA, 23 bp, Artificial Sequence
  human ApoB siRNA sequence
actttgaaacttgaagacacacc

SEQ ID NO: 1118 - DNA, 23 bp, Artificial Sequence
  human ApoB siRNA sequence
ctttgaaacttgaagacacacca

SEQ ID NO: 1119 - DNA, 23 bp, Artificial Sequence
  human ApoB siRNA sequence
tttgaaacttgaagacacaccaa

SEQ ID NO: 1120 - DNA, 23 bp, Artificial Sequence
  human ApoB siRNA sequence
ttgaaacttgaagacacaccaaa

SEQ ID NO: 1121 - DNA, 23 bp, Artificial Sequence
  human ApoB siRNA sequence
tgaaacttgaagacacaccaaag

SEQ ID NO: 1122 - DNA, 23 bp, Artificial Sequence
  human ApoB siRNA sequence
gaaacttgaagacacaccaaaga

SEQ ID NO: 1123 - DNA, 23 bp, Artificial Sequence
  human ApoB siRNA sequence
aaacttgaagacacaccaaagat

SEQ ID NO: 1124 - DNA, 23 bp, Artificial Sequence
  human ApoB siRNA sequence
aacttgaagacacaccaaagatc

SEQ ID NO: 1125 - DNA, 23 bp, Artificial Sequence
  human ApoB siRNA sequence
acttgaagacacaccaaagatca

SEQ ID NO: 1126 - DNA, 23 bp, Artificial Sequence
  human ApoB siRNA sequence
cttgaagacacaccaaagatcaa

SEQ ID NO: 1127 - DNA, 23 bp, Artificial Sequence
  human ApoB siRNA sequence
ttgaagacacaccaaagatcaac

SEQ ID NO: 1128 - DNA, 23 bp, Artificial Sequence
  human ApoB siRNA sequence
tgaagacacaccaaagatcaaca

SEQ ID NO: 1129 - DNA, 23 bp, Artificial Sequence
  human ApoB siRNA sequence
gaagacacaccaaagatcaacag

SEQ ID NO: 1130 - DNA, 23 bp, Artificial Sequence
  human ApoB siRNA sequence
aagacacaccaaagatcaacagc

SEQ ID NO: 1131 - DNA, 23 bp, Artificial Sequence
  human ApoB siRNA sequence
agacacaccaaagatcaacagcc

SEQ ID NO: 1132 - DNA, 23 bp, Artificial Sequence
  human ApoB siRNA sequence
gacacaccaaagatcaacagccg

SEQ ID NO: 1133 - DNA, 23 bp, Artificial Sequence
  human ApoB siRNA sequence
acacaccaaagatcaacagccgc

SEQ ID NO: 1134 - DNA, 23 bp, Artificial Sequence
  human ApoB siRNA sequence
cacaccaaagatcaacagccgct

SEQ ID NO: 1135 - DNA, 23 bp, Artificial Sequence
  human ApoB siRNA sequence
acaccaaagatcaacagccgctt

SEQ ID NO: 1136 - DNA, 23 bp, Artificial Sequence
  human ApoB siRNA sequence
caccaaagatcaacagccgcttc

SEQ ID NO: 1137 - DNA, 23 bp, Artificial Sequence
  human ApoB siRNA sequence
accaaagatcaacagccgcttct

SEQ ID NO: 1138 - DNA, 23 bp, Artificial Sequence
  human ApoB siRNA sequence
ccaaagatcaacagccgcttctt

SEQ ID NO: 1139 - DNA, 23 bp, Artificial Sequence
  human ApoB siRNA sequence
caaagatcaacagccgcttcttt

SEQ ID NO: 1140 - DNA, 23 bp, Artificial Sequence
  human ApoB siRNA sequence
aaagatcaacagccgcttctttg

SEQ ID NO: 1141 - DNA, 23 bp, Artificial Sequence
  human ApoB siRNA sequence
aagatcaacagccgcttctttgg

SEQ ID NO: 1142 - DNA, 23 bp, Artificial Sequence
  human ApoB siRNA sequence
agatcaacagccgcttctttggt

SEQ ID NO: 1143 - DNA, 23 bp, Artificial Sequence
  human ApoB siRNA sequence
gatcaacagccgcttctttggtg

SEQ ID NO: 1144 - DNA, 23 bp, Artificial Sequence
  human ApoB siRNA sequence
atcaacagccgcttctttggtga

SEQ ID NO: 1145 - DNA, 23 bp, Artificial Sequence
  human ApoB siRNA sequence
tcaacagccgcttctttggtgaa

SEQ ID NO: 1146 - DNA, 23 bp, Artificial Sequence
  human ApoB siRNA sequence
caacagccgcttctttggtgaag

SEQ ID NO: 1147 - DNA, 23 bp, Artificial Sequence
  human ApoB siRNA sequence
aacagccgcttctttggtgaagg

SEQ ID NO: 1148 - DNA, 23 bp, Artificial Sequence
  human ApoB siRNA sequence
acagccgcttctttggtgaaggt

SEQ ID NO: 1149 - DNA, 23 bp, Artificial Sequence
  human ApoB siRNA sequence
cagccgcttctttggtgaaggta

SEQ ID NO: 1150 - DNA, 23 bp, Artificial Sequence
  human ApoB siRNA sequence
agccgcttctttggtgaaggtac

SEQ ID NO: 1151 - DNA, 23 bp, Artificial Sequence
  human ApoB siRNA sequence
gccgcttctttggtgaaggtact

SEQ ID NO: 1152 - DNA, 23 bp, Artificial Sequence
  human ApoB siRNA sequence
ccgcttctttggtgaaggtacta

SEQ ID NO: 1153 - DNA, 23 bp, Artificial Sequence
  human ApoB siRNA sequence
cgcttctttggtgaaggtactaa

SEQ ID NO: 1154 - DNA, 23 bp, Artificial Sequence
  human ApoB siRNA sequence
gcttctttggtgaaggtactaag

SEQ ID NO: 1155 - DNA, 23 bp, Artificial Sequence
  human ApoB siRNA sequence
cttctttggtgaaggtactaaga

SEQ ID NO: 1156 - DNA, 23 bp, Artificial Sequence
  human ApoB siRNA sequence
ttctttggtgaaggtactaagaa

SEQ ID NO: 1157 - DNA, 23 bp, Artificial Sequence
  human ApoB siRNA sequence
tctttggtgaaggtactaagaag

SEQ ID NO: 1158 - DNA, 23 bp, Artificial Sequence
  human ApoB siRNA sequence
ctttggtgaaggtactaagaaga

SEQ ID NO: 1159 - DNA, 23 bp, Artificial Sequence
  human ApoB siRNA sequence
tttggtgaaggtactaagaagat

SEQ ID NO: 1160 - DNA, 23 bp, Artificial Sequence
  human ApoB siRNA sequence
ttggtgaaggtactaagaagatg

SEQ ID NO: 1161 - DNA, 23 bp, Artificial Sequence
  human ApoB siRNA sequence
tggtgaaggtactaagaagatgg

SEQ ID NO: 1162 - DNA, 23 bp, Artificial Sequence
  human ApoB siRNA sequence
ggtgaaggtactaagaagatggg

SEQ ID NO: 1163 - DNA, 23 bp, Artificial Sequence
  human ApoB siRNA sequence
gtgaaggtactaagaagatgggc

SEQ ID NO: 1164 - DNA, 23 bp, Artificial Sequence
  human ApoB siRNA sequence
tgaaggtactaagaagatgggcc

SEQ ID NO: 1165 - DNA, 23 bp, Artificial Sequence
  human ApoB siRNA sequence
gaaggtactaagaagatgggcct

SEQ ID NO: 1166 - DNA, 23 bp, Artificial Sequence
  human ApoB siRNA sequence
aaggtactaagaagatgggcctc

SEQ ID NO: 1167 - DNA, 23 bp, Artificial Sequence
  human ApoB siRNA sequence
aggtactaagaagatgggcctcg

SEQ ID NO: 1168 - DNA, 23 bp, Artificial Sequence
  human ApoB siRNA sequence
ggtactaagaagatgggcctcgc

SEQ ID NO: 1169 - DNA, 23 bp, Artificial Sequence
  human ApoB siRNA sequence
gtactaagaagatgggcctcgca

SEQ ID NO: 1170 - DNA, 23 bp, Artificial Sequence
  human ApoB siRNA sequence
tactaagaagatgggcctcgcat

SEQ ID NO: 1171 - DNA, 23 bp, Artificial Sequence
  human ApoB siRNA sequence
actaagaagatgggcctcgcatt

SEQ ID NO: 1172 - DNA, 23 bp, Artificial Sequence
  human ApoB siRNA sequence
ctaagaagatgggcctcgcattt

SEQ ID NO: 1173 - DNA, 23 bp, Artificial Sequence
  human ApoB siRNA sequence
taagaagatgggcctcgcatttg

SEQ ID NO: 1174 - DNA, 23 bp, Artificial Sequence
  human ApoB siRNA sequence
aagaagatgggcctcgcatttga

SEQ ID NO: 1175 - DNA, 23 bp, Artificial Sequence
  human ApoB siRNA sequence
agaagatgggcctcgcatttgag

SEQ ID NO: 1176 - DNA, 23 bp, Artificial Sequence
  human ApoB siRNA sequence
gaagatgggcctcgcatttgaga

SEQ ID NO: 1177 - DNA, 23 bp, Artificial Sequence
  human ApoB siRNA sequence
aagatgggcctcgcatttgagag

SEQ ID NO: 1178 - DNA, 23 bp, Artificial Sequence
  human ApoB siRNA sequence
agatgggcctcgcatttgagagc

SEQ ID NO: 1179 - DNA, 23 bp, Artificial Sequence
  human ApoB siRNA sequence
gatgggcctcgcatttgagagca

SEQ ID NO: 1180 - DNA, 23 bp, Artificial Sequence
  human ApoB siRNA sequence
atgggcctcgcatttgagagcac

SEQ ID NO: 1181 - DNA, 23 bp, Artificial Sequence
  human ApoB siRNA sequence
tgggcctcgcatttgagagcacc

SEQ ID NO: 1182 - DNA, 23 bp, Artificial Sequence
  human ApoB siRNA sequence
gggcctcgcatttgagagcacca

SEQ ID NO: 1183 - DNA, 23 bp, Artificial Sequence
  human ApoB siRNA sequence
ggcctcgcatttgagagcaccaa

SEQ ID NO: 1184 - DNA, 23 bp, Artificial Sequence
  human ApoB siRNA sequence
gcctcgcatttgagagcaccaaa

SEQ ID NO: 1185 - DNA, 23 bp, Artificial Sequence
  human ApoB siRNA sequence
cctcgcatttgagagcaccaaat

SEQ ID NO: 1186 - DNA, 23 bp, Artificial Sequence
  human ApoB siRNA sequence
ctcgcatttgagagcaccaaatc

SEQ ID NO: 1187 - DNA, 23 bp, Artificial Sequence
  human ApoB siRNA sequence
tcgcatttgagagcaccaaatcc

SEQ ID NO: 1188 - DNA, 23 bp, Artificial Sequence
  human ApoB siRNA sequence
cgcatttgagagcaccaaatcca

SEQ ID NO: 1189 - DNA, 23 bp, Artificial Sequence
  human ApoB siRNA sequence
gcatttgagagcaccaaatccac

SEQ ID NO: 1190 - DNA, 23 bp, Artificial Sequence
  human ApoB siRNA sequence
catttgagagcaccaaatccaca

SEQ ID NO: 1191 - DNA, 23 bp, Artificial Sequence
  human ApoB siRNA sequence
atttgagagcaccaaatccacat

SEQ ID NO: 1192 - DNA, 23 bp, Artificial Sequence
  human ApoB siRNA sequence
tttgagagcaccaaatccacatc

SEQ ID NO: 1193 - DNA, 23 bp, Artificial Sequence
  human ApoB siRNA sequence
ttgagagcaccaaatccacatca

SEQ ID NO: 1194 - DNA, 23 bp, Artificial Sequence
  human ApoB siRNA sequence
tgagagcaccaaatccacatcac

SEQ ID NO: 1195 - DNA, 23 bp, Artificial Sequence
  human ApoB siRNA sequence
gagagcaccaaatccacatcacc

SEQ ID NO: 1196 - DNA, 23 bp, Artificial Sequence
  human ApoB siRNA sequence
agagcaccaaatccacatcacct

SEQ ID NO: 1197 - DNA, 23 bp, Artificial Sequence
  human ApoB siRNA sequence
gagcaccaaatccacatcacctc

SEQ ID NO: 1198 - DNA, 23 bp, Artificial Sequence
  human ApoB siRNA sequence
agcaccaaatccacatcacctcc

SEQ ID NO: 1199 - DNA, 23 bp, Artificial Sequence
  human ApoB siRNA sequence
gcaccaaatccacatcacctcca

SEQ ID NO: 1200 - DNA, 23 bp, Artificial Sequence
  human ApoB siRNA sequence
caccaaatccacatcacctccaa

SEQ ID NO: 1201 - DNA, 23 bp, Artificial Sequence
  human ApoB siRNA sequence
accaaatccacatcacctccaaa

SEQ ID NO: 1202 - DNA, 23 bp, Artificial Sequence
  human ApoB siRNA sequence
ccaaatccacatcacctccaaag

SEQ ID NO: 1203 - DNA, 23 bp, Artificial Sequence
  human ApoB siRNA sequence
caaatccacatcacctccaaagc

SEQ ID NO: 1204 - DNA, 23 bp, Artificial Sequence
  human ApoB siRNA sequence
aaatccacatcacctccaaagca

SEQ ID NO: 1205 - DNA, 23 bp, Artificial Sequence
  human ApoB siRNA sequence
aatccacatcacctccaaagcag

SEQ ID NO: 1206 - DNA, 23 bp, Artificial Sequence
  human ApoB siRNA sequence
atccacatcacctccaaagcagg

SEQ ID NO: 1207 - DNA, 23 bp, Artificial Sequence
  human ApoB siRNA sequence
tccacatcacctccaaagcaggc

SEQ ID NO: 1208 - DNA, 23 bp, Artificial Sequence
  human ApoB siRNA sequence
ccacatcacctccaaagcaggcc

SEQ ID NO: 1209 - DNA, 23 bp, Artificial Sequence
  human ApoB siRNA sequence
cacatcacctccaaagcaggccg

SEQ ID NO: 1210 - DNA, 23 bp, Artificial Sequence
  human ApoB siRNA sequence
acatcacctccaaagcaggccga

SEQ ID NO: 1211 - DNA, 23 bp, Artificial Sequence
  human ApoB siRNA sequence
catcacctccaaagcaggccgaa

SEQ ID NO: 1212 - DNA, 23 bp, Artificial Sequence
  human ApoB siRNA sequence
atcacctccaaagcaggccgaag

SEQ ID NO: 1213 - DNA, 23 bp, Artificial Sequence
  human ApoB siRNA sequence
tcacctccaaagcaggccgaagc

SEQ ID NO: 1214 - DNA, 23 bp, Artificial Sequence
  human ApoB siRNA sequence
cacctccaaagcaggccgaagct

SEQ ID NO: 1215 - DNA, 23 bp, Artificial Sequence
  human ApoB siRNA sequence
acctccaaagcaggccgaagctg

SEQ ID NO: 1216 - DNA, 23 bp, Artificial Sequence
  human ApoB siRNA sequence
cctccaaagcaggccgaagctgt

SEQ ID NO: 1217 - DNA, 23 bp, Artificial Sequence
  human ApoB siRNA sequence
ctccaaagcaggccgaagctgtt

SEQ ID NO: 1218 - DNA, 23 bp, Artificial Sequence
  human ApoB siRNA sequence
tccaaagcaggccgaagctgttt

SEQ ID NO: 1219 - DNA, 23 bp, Artificial Sequence
  human ApoB siRNA sequence
ccaaagcaggccgaagctgtttt

SEQ ID NO: 1220 - DNA, 23 bp, Artificial Sequence
  human ApoB siRNA sequence
caaagcaggccgaagctgttttg

SEQ ID NO: 1221 - DNA, 23 bp, Artificial Sequence
  human ApoB siRNA sequence
aaagcaggccgaagctgttttga

SEQ ID NO: 1222 - DNA, 23 bp, Artificial Sequence
  human ApoB siRNA sequence
aagcaggccgaagctgttttgaa

SEQ ID NO: 1223 - DNA, 23 bp, Artificial Sequence
  human ApoB siRNA sequence
agcaggccgaagctgttttgaag

SEQ ID NO: 1224 - DNA, 23 bp, Artificial Sequence
  human ApoB siRNA sequence
gcaggccgaagctgttttgaaga

SEQ ID NO: 1225 - DNA, 23 bp, Artificial Sequence
  human ApoB siRNA sequence
caggccgaagctgttttgaagac

SEQ ID NO: 1226 - DNA, 23 bp, Artificial Sequence
  human ApoB siRNA sequence
aggccgaagctgttttgaagact

SEQ ID NO: 1227 - DNA, 23 bp, Artificial Sequence
  human ApoB siRNA sequence
ggccgaagctgttttgaagactc

SEQ ID NO: 1228 - DNA, 23 bp, Artificial Sequence
  human ApoB siRNA sequence
gccgaagctgttttgaagactct

SEQ ID NO: 1229 - DNA, 23 bp, Artificial Sequence
  human ApoB siRNA sequence
ccgaagctgttttgaagactctc

SEQ ID NO: 1230 - DNA, 23 bp, Artificial Sequence
  human ApoB siRNA sequence
cgaagctgttttgaagactctcc

SEQ ID NO: 1231 - DNA, 23 bp, Artificial Sequence
  human ApoB siRNA sequence
gaagctgttttgaagactctcca

SEQ ID NO: 1232 - DNA, 23 bp, Artificial Sequence
  human ApoB siRNA sequence
aagctgttttgaagactctccag

SEQ ID NO: 1233 - DNA, 23 bp, Artificial Sequence
  human ApoB siRNA sequence
agctgttttgaagactctccagg

SEQ ID NO: 1234 - DNA, 23 bp, Artificial Sequence
  human ApoB siRNA sequence
gctgttttgaagactctccagga

SEQ ID NO: 1235 - DNA, 23 bp, Artificial Sequence
  human ApoB siRNA sequence
ctgttttgaagactctccaggaa

SEQ ID NO: 1236 - DNA, 23 bp, Artificial Sequence
  human ApoB siRNA sequence
tgttttgaagactctccaggaac

SEQ ID NO: 1237 - DNA, 23 bp, Artificial Sequence
  human ApoB siRNA sequence
gttttgaagactctccaggaact

SEQ ID NO: 1238 - DNA, 23 bp, Artificial Sequence
  human ApoB siRNA sequence
ttttgaagactctccaggaactg

SEQ ID NO: 1239 - DNA, 23 bp, Artificial Sequence
  human ApoB siRNA sequence
tttgaagactctccaggaactga

SEQ ID NO: 1240 - DNA, 23 bp, Artificial Sequence
  human ApoB siRNA sequence
ttgaagactctccaggaactgaa

SEQ ID NO: 1241 - DNA, 23 bp, Artificial Sequence
  human ApoB siRNA sequence
tgaagactctccaggaactgaaa

SEQ ID NO: 1242 - DNA, 23 bp, Artificial Sequence
  human ApoB siRNA sequence
gaagactctccaggaactgaaaa

SEQ ID NO: 1243 - DNA, 23 bp, Artificial Sequence
  human ApoB siRNA sequence
aagactctccaggaactgaaaaa

SEQ ID NO: 1244 - DNA, 23 bp, Artificial Sequence
  human ApoB siRNA sequence
agactctccaggaactgaaaaaa

SEQ ID NO: 1245 - DNA, 23 bp, Artificial Sequence
  human ApoB siRNA sequence
gactctccaggaactgaaaaaac

SEQ ID NO: 1246 - DNA, 23 bp, Artificial Sequence
  human ApoB siRNA sequence
actctccaggaactgaaaaaact

SEQ ID NO: 1247 - DNA, 23 bp, Artificial Sequence
  human ApoB siRNA sequence
ctctccaggaactgaaaaaacta

SEQ ID NO: 1248 - DNA, 23 bp, Artificial Sequence
  human ApoB siRNA sequence
tctccaggaactgaaaaaactaa

SEQ ID NO: 1249 - DNA, 23 bp, Artificial Sequence
  human ApoB siRNA sequence
ctccaggaactgaaaaaactaac

SEQ ID NO: 1250 - DNA, 23 bp, Artificial Sequence
  human ApoB siRNA sequence
tccaggaactgaaaaaactaacc

SEQ ID NO: 1251 - DNA, 23 bp, Artificial Sequence
  human ApoB siRNA sequence
ccaggaactgaaaaaactaacca

SEQ ID NO: 1252 - DNA, 23 bp, Artificial Sequence
  human ApoB siRNA sequence
caggaactgaaaaaactaaccat

SEQ ID NO: 1253 - DNA, 23 bp, Artificial Sequence
  human ApoB siRNA sequence
aggaactgaaaaaactaaccatc

SEQ ID NO: 1254 - DNA, 23 bp, Artificial Sequence
  human ApoB siRNA sequence
ggaactgaaaaaactaaccatct

SEQ ID NO: 1255 - DNA, 23 bp, Artificial Sequence
  human ApoB siRNA sequence
gaactgaaaaaactaaccatctc

SEQ ID NO: 1256 - DNA, 23 bp, Artificial Sequence
  human ApoB siRNA sequence
aactgaaaaaactaaccatctct

SEQ ID NO: 1257 - DNA, 23 bp, Artificial Sequence
  human ApoB siRNA sequence
actgaaaaaactaaccatctctg

SEQ ID NO: 1258 - DNA, 23 bp, Artificial Sequence
  human ApoB siRNA sequence
ctgaaaaaactaaccatctctga

SEQ ID NO: 1259 - DNA, 23 bp, Artificial Sequence
  human ApoB siRNA sequence
tgaaaaaactaaccatctctgag

SEQ ID NO: 1260 - DNA, 23 bp, Artificial Sequence
  human ApoB siRNA sequence
gaaaaaactaaccatctctgagc

SEQ ID NO: 1261 - DNA, 23 bp, Artificial Sequence
  human ApoB siRNA sequence
aaaaaactaaccatctctgagca

SEQ ID NO: 1262 - DNA, 23 bp, Artificial Sequence
  human ApoB siRNA sequence
aaaaactaaccatctctgagcaa

SEQ ID NO: 1263 - DNA, 23 bp, Artificial Sequence
  human ApoB siRNA sequence
aaaactaaccatctctgagcaaa

SEQ ID NO: 1264 - DNA, 23 bp, Artificial Sequence
  human ApoB siRNA sequence
aaactaaccatctctgagcaaaa

SEQ ID NO: 1265 - DNA, 23 bp, Artificial Sequence
  human ApoB siRNA sequence
aactaaccatctctgagcaaaat

SEQ ID NO: 1266 - DNA, 23 bp, Artificial Sequence
  human ApoB siRNA sequence
actaaccatctctgagcaaaata

SEQ ID NO: 1267 - DNA, 23 bp, Artificial Sequence
  human ApoB siRNA sequence
ctaaccatctctgagcaaaatat

SEQ ID NO: 1268 - DNA, 23 bp, Artificial Sequence
  human ApoB siRNA sequence
taaccatctctgagcaaaatatc

SEQ ID NO: 1269 - DNA, 23 bp, Artificial Sequence
  human ApoB siRNA sequence
aaccatctctgagcaaaatatcc

SEQ ID NO: 1270 - DNA, 23 bp, Artificial Sequence
  human ApoB siRNA sequence
accatctctgagcaaaatatcca

SEQ ID NO: 1271 - DNA, 23 bp, Artificial Sequence
  human ApoB siRNA sequence
ccatctctgagcaaaatatccag

SEQ ID NO: 1272 - DNA, 23 bp, Artificial Sequence
  human ApoB siRNA sequence
catctctgagcaaaatatccaga

SEQ ID NO: 1273 - DNA, 23 bp, Artificial Sequence
  human ApoB siRNA sequence
atctctgagcaaaatatccagag

SEQ ID NO: 1274 - DNA, 23 bp, Artificial Sequence
  human ApoB siRNA sequence
tctctgagcaaaatatccagaga

SEQ ID NO: 1275 - DNA, 23 bp, Artificial Sequence
  human ApoB siRNA sequence
ctctgagcaaaatatccagagag

SEQ ID NO: 1276 - DNA, 23 bp, Artificial Sequence
  human ApoB siRNA sequence
tctgagcaaaatatccagagagc

SEQ ID NO: 1277 - DNA, 23 bp, Artificial Sequence
  human ApoB siRNA sequence
ctgagcaaaatatccagagagct

SEQ ID NO: 1278 - DNA, 23 bp, Artificial Sequence
  human ApoB siRNA sequence
tgagcaaaatatccagagagcta

SEQ ID NO: 1279 - DNA, 23 bp, Artificial Sequence
  human ApoB siRNA sequence
gagcaaaatatccagagagctaa

SEQ ID NO: 1280 - DNA, 23 bp, Artificial Sequence
  human ApoB siRNA sequence
agcaaaatatccagagagctaat

SEQ ID NO: 1281 - DNA, 23 bp, Artificial Sequence
  human ApoB siRNA sequence
gcaaaatatccagagagctaatc

SEQ ID NO: 1282 - DNA, 23 bp, Artificial Sequence
  human ApoB siRNA sequence
caaaatatccagagagctaatct

SEQ ID NO: 1283 - DNA, 23 bp, Artificial Sequence
  human ApoB siRNA sequence
aaaatatccagagagctaatctc

SEQ ID NO: 1284 - DNA, 23 bp, Artificial Sequence
  human ApoB siRNA sequence
aaatatccagagagctaatctct

SEQ ID NO: 1285 - DNA, 23 bp, Artificial Sequence
  human ApoB siRNA sequence
aatatccagagagctaatctctt

SEQ ID NO: 1286 - DNA, 23 bp, Artificial Sequence
  human ApoB siRNA sequence
atatccagagagctaatctcttc

SEQ ID NO: 1287 - DNA, 23 bp, Artificial Sequence
  human ApoB siRNA sequence
tatccagagagctaatctcttca

SEQ ID NO: 1288 - DNA, 23 bp, Artificial Sequence
  human ApoB siRNA sequence
atccagagagctaatctcttcaa

SEQ ID NO: 1289 - DNA, 23 bp, Artificial Sequence
  human ApoB siRNA sequence
tccagagagctaatctcttcaat

SEQ ID NO: 1290 - DNA, 23 bp, Artificial Sequence
  human ApoB siRNA sequence
ccagagagctaatctcttcaata

SEQ ID NO: 1291 - DNA, 23 bp, Artificial Sequence
  human ApoB siRNA sequence
cagagagctaatctcttcaataa

SEQ ID NO: 1292 - DNA, 23 bp, Artificial Sequence
  human ApoB siRNA sequence
agagagctaatctcttcaataag

SEQ ID NO: 1293 - DNA, 23 bp, Artificial Sequence
  human ApoB siRNA sequence
gagagctaatctcttcaataagc

SEQ ID NO: 1294 - DNA, 23 bp, Artificial Sequence
  human ApoB siRNA sequence
agagctaatctcttcaataagct

SEQ ID NO: 1295 - DNA, 23 bp, Artificial Sequence
  human ApoB siRNA sequence
gagctaatctcttcaataagctg

SEQ ID NO: 1296 - DNA, 23 bp, Artificial Sequence
  human ApoB siRNA sequence
agctaatctcttcaataagctgg

SEQ ID NO: 1297 - DNA, 23 bp, Artificial Sequence
  human ApoB siRNA sequence
gctaatctcttcaataagctggt

SEQ ID NO: 1298 - DNA, 23 bp, Artificial Sequence
  human ApoB siRNA sequence
ctaatctcttcaataagctggtt

SEQ ID NO: 1299 - DNA, 23 bp, Artificial Sequence
  human ApoB siRNA sequence
taatctcttcaataagctggtta

SEQ ID NO: 1300 - DNA, 23 bp, Artificial Sequence
  human ApoB siRNA sequence
aatctcttcaataagctggttac

SEQ ID NO: 1301 - DNA, 23 bp, Artificial Sequence
  human ApoB siRNA sequence
atctcttcaataagctggttact

SEQ ID NO: 1302 - DNA, 23 bp, Artificial Sequence
  human ApoB siRNA sequence
tctcttcaataagctggttactg

SEQ ID NO: 1303 - DNA, 23 bp, Artificial Sequence
  human ApoB siRNA sequence
ctcttcaataagctggttactga

SEQ ID NO: 1304 - DNA, 23 bp, Artificial Sequence
  human ApoB siRNA sequence
tcttcaataagctggttactgag

SEQ ID NO: 1305 - DNA, 23 bp, Artificial Sequence
  human ApoB siRNA sequence
cttcaataagctggttactgagc

SEQ ID NO: 1306 - DNA, 23 bp, Artificial Sequence
  human ApoB siRNA sequence
ttcaataagctggttactgagct

SEQ ID NO: 1307 - DNA, 23 bp, Artificial Sequence
  human ApoB siRNA sequence
tcaataagctggttactgagctg

SEQ ID NO: 1308 - DNA, 23 bp, Artificial Sequence
  human ApoB siRNA sequence
caataagctggttactgagctga

SEQ ID NO: 1309 - DNA, 23 bp, Artificial Sequence
  human ApoB siRNA sequence
aataagctggttactgagctgag

SEQ ID NO: 1310 - DNA, 23 bp, Artificial Sequence
  human ApoB siRNA sequence
ataagctggttactgagctgaga

SEQ ID NO: 1311 - DNA, 23 bp, Artificial Sequence
  human ApoB siRNA sequence
taagctggttactgagctgagag

SEQ ID NO: 1312 - DNA, 23 bp, Artificial Sequence
  human ApoB siRNA sequence
aagctggttactgagctgagagg

SEQ ID NO: 1313 - DNA, 23 bp, Artificial Sequence
  human ApoB siRNA sequence
agctggttactgagctgagaggc

SEQ ID NO: 1314 - DNA, 23 bp, Artificial Sequence
  human ApoB siRNA sequence
gctggttactgagctgagaggcc

SEQ ID NO: 1315 - DNA, 23 bp, Artificial Sequence
  human ApoB siRNA sequence
ctggttactgagctgagaggcct

SEQ ID NO: 1316 - DNA, 23 bp, Artificial Sequence
  human ApoB siRNA sequence
tggttactgagctgagaggcctc

SEQ ID NO: 1317 - DNA, 23 bp, Artificial Sequence
  human ApoB siRNA sequence
ggttactgagctgagaggcctca

SEQ ID NO: 1318 - DNA, 23 bp, Artificial Sequence
  human ApoB siRNA sequence
gttactgagctgagaggcctcag

SEQ ID NO: 1319 - DNA, 23 bp, Artificial Sequence
  human ApoB siRNA sequence
ttactgagctgagaggcctcagt

SEQ ID NO: 1320 - DNA, 23 bp, Artificial Sequence
  human ApoB siRNA sequence
tactgagctgagaggcctcagtg

SEQ ID NO: 1321 - DNA, 23 bp, Artificial Sequence
  human ApoB siRNA sequence
actgagctgagaggcctcagtga

SEQ ID NO: 1322 - DNA, 23 bp, Artificial Sequence
  human ApoB siRNA sequence
ctgagctgagaggcctcagtgat

SEQ ID NO: 1323 - DNA, 23 bp, Artificial Sequence
  human ApoB siRNA sequence
tgagctgagaggcctcagtgatg

SEQ ID NO: 1324 - DNA, 23 bp, Artificial Sequence
  human ApoB siRNA sequence
gagctgagaggcctcagtgatga

SEQ ID NO: 1325 - DNA, 23 bp, Artificial Sequence
  human ApoB siRNA sequence
agctgagaggcctcagtgatgaa

SEQ ID NO: 1326 - DNA, 23 bp, Artificial Sequence
  human ApoB siRNA sequence
gctgagaggcctcagtgatgaag

SEQ ID NO: 1327 - DNA, 23 bp, Artificial Sequence
  human ApoB siRNA sequence
ctgagaggcctcagtgatgaagc

SEQ ID NO: 1328 - DNA, 23 bp, Artificial Sequence
  human ApoB siRNA sequence
tgagaggcctcagtgatgaagca

SEQ ID NO: 1329 - DNA, 23 bp, Artificial Sequence
  human ApoB siRNA sequence
gagaggcctcagtgatgaagcag

SEQ ID NO: 1330 - DNA, 23 bp, Artificial Sequence
  human ApoB siRNA sequence
agaggcctcagtgatgaagcagt

SEQ ID NO: 1331 - DNA, 23 bp, Artificial Sequence
  human ApoB siRNA sequence
gaggcctcagtgatgaagcagtc

SEQ ID NO: 1332 - DNA, 23 bp, Artificial Sequence
  human ApoB siRNA sequence
aggcctcagtgatgaagcagtca

SEQ ID NO: 1333 - DNA, 23 bp, Artificial Sequence
  human ApoB siRNA sequence
ggcctcagtgatgaagcagtcac

SEQ ID NO: 1334 - DNA, 23 bp, Artificial Sequence
  human ApoB siRNA sequence
gcctcagtgatgaagcagtcaca

SEQ ID NO: 1335 - DNA, 23 bp, Artificial Sequence
  human ApoB siRNA sequence
cctcagtgatgaagcagtcacat

SEQ ID NO: 1336 - DNA, 23 bp, Artificial Sequence
  human ApoB siRNA sequence
ctcagtgatgaagcagtcacatc

SEQ ID NO: 1337 - DNA, 23 bp, Artificial Sequence
  human ApoB siRNA sequence
tcagtgatgaagcagtcacatct

SEQ ID NO: 1338 - DNA, 23 bp, Artificial Sequence
  human ApoB siRNA sequence
cagtgatgaagcagtcacatctc

SEQ ID NO: 1339 - DNA, 23 bp, Artificial Sequence
  human ApoB siRNA sequence
agtgatgaagcagtcacatctct

SEQ ID NO: 1340 - DNA, 23 bp, Artificial Sequence
  human ApoB siRNA sequence
gtgatgaagcagtcacatctctc

SEQ ID NO: 1341 - DNA, 23 bp, Artificial Sequence
  human ApoB siRNA sequence
tgatgaagcagtcacatctctct

SEQ ID NO: 1342 - DNA, 23 bp, Artificial Sequence
  human ApoB siRNA sequence
gatgaagcagtcacatctctctt

SEQ ID NO: 1343 - DNA, 23 bp, Artificial Sequence
  human ApoB siRNA sequence
atgaagcagtcacatctctcttg

SEQ ID NO: 1344 - DNA, 23 bp, Artificial Sequence
  human ApoB siRNA sequence
tgaagcagtcacatctctcttgc

SEQ ID NO: 1345 - DNA, 23 bp, Artificial Sequence
  human ApoB siRNA sequence
gaagcagtcacatctctcttgcc

SEQ ID NO: 1346 - DNA, 23 bp, Artificial Sequence
  human ApoB siRNA sequence
aagcagtcacatctctcttgcca

SEQ ID NO: 1347 - DNA, 23 bp, Artificial Sequence
  human ApoB siRNA sequence
agcagtcacatctctcttgccac

SEQ ID NO: 1348 - DNA, 23 bp, Artificial Sequence
  human ApoB siRNA sequence
gcagtcacatctctcttgccaca

SEQ ID NO: 1349 - DNA, 23 bp, Artificial Sequence
  human ApoB siRNA sequence
cagtcacatctctcttgccacag

SEQ ID NO: 1350 - DNA, 23 bp, Artificial Sequence
  human ApoB siRNA sequence
agtcacatctctcttgccacagc

SEQ ID NO: 1351 - DNA, 23 bp, Artificial Sequence
  human ApoB siRNA sequence
gtcacatctctcttgccacagct

SEQ ID NO: 1352 - DNA, 23 bp, Artificial Sequence
  human ApoB siRNA sequence
tcacatctctcttgccacagctg

SEQ ID NO: 1353 - DNA, 23 bp, Artificial Sequence
  human ApoB siRNA sequence
cacatctctcttgccacagctga

SEQ ID NO: 1354 - DNA, 23 bp, Artificial Sequence
  human ApoB siRNA sequence
acatctctcttgccacagctgat

SEQ ID NO: 1355 - DNA, 23 bp, Artificial Sequence
  human ApoB siRNA sequence
catctctcttgccacagctgatt

SEQ ID NO: 1356 - DNA, 23 bp, Artificial Sequence
  human ApoB siRNA sequence
atctctcttgccacagctgattg

SEQ ID NO: 1357 - DNA, 23 bp, Artificial Sequence
  human ApoB siRNA sequence
tctctcttgccacagctgattga

SEQ ID NO: 1358 - DNA, 23 bp, Artificial Sequence
  human ApoB siRNA sequence
ctctcttgccacagctgattgag

SEQ ID NO: 1359 - DNA, 23 bp, Artificial Sequence
  human ApoB siRNA sequence
tctcttgccacagctgattgagg

SEQ ID NO: 1360 - DNA, 23 bp, Artificial Sequence
  human ApoB siRNA sequence
ctcttgccacagctgattgaggt

SEQ ID NO: 1361 - DNA, 23 bp, Artificial Sequence
  human ApoB siRNA sequence
tcttgccacagctgattgaggtg

SEQ ID NO: 1362 - DNA, 23 bp, Artificial Sequence
  human ApoB siRNA sequence
cttgccacagctgattgaggtgt

SEQ ID NO: 1363 - DNA, 23 bp, Artificial Sequence
  human ApoB siRNA sequence
ttgccacagctgattgaggtgtc

SEQ ID NO: 1364 - DNA, 23 bp, Artificial Sequence
  human ApoB siRNA sequence
tgccacagctgattgaggtgtcc

SEQ ID NO: 1365 - DNA, 23 bp, Artificial Sequence
  human ApoB siRNA sequence
gccacagctgattgaggtgtcca

SEQ ID NO: 1366 - DNA, 23 bp, Artificial Sequence
  human ApoB siRNA sequence
ccacagctgattgaggtgtccag

SEQ ID NO: 1367 - DNA, 23 bp, Artificial Sequence
  human ApoB siRNA sequence
cacagctgattgaggtgtccagc

SEQ ID NO: 1368 - DNA, 23 bp, Artificial Sequence
  human ApoB siRNA sequence
acagctgattgaggtgtccagcc

SEQ ID NO: 1369 - DNA, 23 bp, Artificial Sequence
  human ApoB siRNA sequence
cagctgattgaggtgtccagccc

SEQ ID NO: 1370 - DNA, 23 bp, Artificial Sequence
  human ApoB siRNA sequence
agctgattgaggtgtccagcccc

SEQ ID NO: 1371 - DNA, 23 bp, Artificial Sequence
  human ApoB siRNA sequence
gctgattgaggtgtccagcccca

SEQ ID NO: 1372 - DNA, 23 bp, Artificial Sequence
  human ApoB siRNA sequence
ctgattgaggtgtccagccccat

SEQ ID NO: 1373 - DNA, 23 bp, Artificial Sequence
  human ApoB siRNA sequence
tgattgaggtgtccagccccatc

SEQ ID NO: 1374 - DNA, 23 bp, Artificial Sequence
  human ApoB siRNA sequence
gattgaggtgtccagccccatca

SEQ ID NO: 1375 - DNA, 23 bp, Artificial Sequence
  human ApoB siRNA sequence
attgaggtgtccagccccatcac

SEQ ID NO: 1376 - DNA, 23 bp, Artificial Sequence
  human ApoB siRNA sequence
ttgaggtgtccagccccatcact

SEQ ID NO: 1377 - DNA, 23 bp, Artificial Sequence
  human ApoB siRNA sequence
tgaggtgtccagccccatcactt

SEQ ID NO: 1378 - DNA, 23 bp, Artificial Sequence
  human ApoB siRNA sequence
gaggtgtccagccccatcacttt

SEQ ID NO: 1379 - DNA, 23 bp, Artificial Sequence
  human ApoB siRNA sequence
aggtgtccagccccatcacttta

SEQ ID NO: 1380 - DNA, 23 bp, Artificial Sequence
  human ApoB siRNA sequence
ggtgtccagccccatcactttac

SEQ ID NO: 1381 - DNA, 23 bp, Artificial Sequence
  human ApoB siRNA sequence
gtgtccagccccatcactttaca

SEQ ID NO: 1382 - DNA, 23 bp, Artificial Sequence
  human ApoB siRNA sequence
tgtccagccccatcactttacaa

SEQ ID NO: 1383 - DNA, 23 bp, Artificial Sequence
  human ApoB siRNA sequence
gtccagccccatcactttacaag

SEQ ID NO: 1384 - DNA, 23 bp, Artificial Sequence
  human ApoB siRNA sequence
tccagccccatcactttacaagc

SEQ ID NO: 1385 - DNA, 23 bp, Artificial Sequence
  human ApoB siRNA sequence
ccagccccatcactttacaagcc

SEQ ID NO: 1386 - DNA, 23 bp, Artificial Sequence
  human ApoB siRNA sequence
cagccccatcactttacaagcct

SEQ ID NO: 1387 - DNA, 23 bp, Artificial Sequence
  human ApoB siRNA sequence
agccccatcactttacaagcctt

SEQ ID NO: 1388 - DNA, 23 bp, Artificial Sequence
  human ApoB siRNA sequence
gccccatcactttacaagccttg

SEQ ID NO: 1389 - DNA, 23 bp, Artificial Sequence
  human ApoB siRNA sequence
ccccatcactttacaagccttgg

SEQ ID NO: 1390 - DNA, 23 bp, Artificial Sequence
  human ApoB siRNA sequence
cccatcactttacaagccttggt

SEQ ID NO: 1391 - DNA, 23 bp, Artificial Sequence
  human ApoB siRNA sequence
ccatcactttacaagccttggtt

SEQ ID NO: 1392 - DNA, 23 bp, Artificial Sequence
  human ApoB siRNA sequence
catcactttacaagccttggttc

SEQ ID NO: 1393 - DNA, 23 bp, Artificial Sequence
  human ApoB siRNA sequence
atcactttacaagccttggttca

SEQ ID NO: 1394 - DNA, 23 bp, Artificial Sequence
  human ApoB siRNA sequence
tcactttacaagccttggttcag

SEQ ID NO: 1395 - DNA, 23 bp, Artificial Sequence
  human ApoB siRNA sequence
cactttacaagccttggttcagt

SEQ ID NO: 1396 - DNA, 23 bp, Artificial Sequence
  human ApoB siRNA sequence
actttacaagccttggttcagtg

SEQ ID NO: 1397 - DNA, 23 bp, Artificial Sequence
  human ApoB siRNA sequence
ctttacaagccttggttcagtgt

SEQ ID NO: 1398 - DNA, 23 bp, Artificial Sequence
  human ApoB siRNA sequence
tttacaagccttggttcagtgtg

SEQ ID NO: 1399 - DNA, 23 bp, Artificial Sequence
  human ApoB siRNA sequence
ttacaagccttggttcagtgtgg

SEQ ID NO: 1400 - DNA, 23 bp, Artificial Sequence
  human ApoB siRNA sequence
tacaagccttggttcagtgtgga

SEQ ID NO: 1401 - DNA, 23 bp, Artificial Sequence
  human ApoB siRNA sequence
acaagccttggttcagtgtggac

SEQ ID NO: 1402 - DNA, 23 bp, Artificial Sequence
  human ApoB siRNA sequence
caagccttggttcagtgtggaca

SEQ ID NO: 1403 - DNA, 23 bp, Artificial Sequence
  human ApoB siRNA sequence
aagccttggttcagtgtggacag

SEQ ID NO: 1404 - DNA, 23 bp, Artificial Sequence
  human ApoB siRNA sequence
agccttggttcagtgtggacagc

SEQ ID NO: 1405 - DNA, 23 bp, Artificial Sequence
  human ApoB siRNA sequence
gccttggttcagtgtggacagcc

SEQ ID NO: 1406 - DNA, 23 bp, Artificial Sequence
  human ApoB siRNA sequence
ccttggttcagtgtggacagcct

SEQ ID NO: 1407 - DNA, 23 bp, Artificial Sequence
  human ApoB siRNA sequence
cttggttcagtgtggacagcctc

SEQ ID NO: 1408 - DNA, 23 bp, Artificial Sequence
  human ApoB siRNA sequence
ttggttcagtgtggacagcctca

SEQ ID NO: 1409 - DNA, 23 bp, Artificial Sequence
  human ApoB siRNA sequence
tggttcagtgtggacagcctcag

SEQ ID NO: 1410 - DNA, 23 bp, Artificial Sequence
  human ApoB siRNA sequence
ggttcagtgtggacagcctcagt

SEQ ID NO: 1411 - DNA, 23 bp, Artificial Sequence
  human ApoB siRNA sequence
gttcagtgtggacagcctcagtg

SEQ ID NO: 1412 - DNA, 23 bp, Artificial Sequence
  human ApoB siRNA sequence
ttcagtgtggacagcctcagtgc

SEQ ID NO: 1413 - DNA, 23 bp, Artificial Sequence
  human ApoB siRNA sequence
tcagtgtggacagcctcagtgct

SEQ ID NO: 1414 - DNA, 23 bp, Artificial Sequence
  human ApoB siRNA sequence
cagtgtggacagcctcagtgctc

SEQ ID NO: 1415 - DNA, 23 bp, Artificial Sequence
  human ApoB siRNA sequence
agtgtggacagcctcagtgctcc

SEQ ID NO: 1416 - DNA, 23 bp, Artificial Sequence
  human ApoB siRNA sequence
gtgtggacagcctcagtgctcca

SEQ ID NO: 1417 - DNA, 23 bp, Artificial Sequence
  human ApoB siRNA sequence
tgtggacagcctcagtgctccac

SEQ ID NO: 1418 - DNA, 23 bp, Artificial Sequence
  human ApoB siRNA sequence
gtggacagcctcagtgctccact

SEQ ID NO: 1419 - DNA, 23 bp, Artificial Sequence
  human ApoB siRNA sequence
tggacagcctcagtgctccactc

SEQ ID NO: 1420 - DNA, 23 bp, Artificial Sequence
  human ApoB siRNA sequence
ggacagcctcagtgctccactca

SEQ ID NO: 1421 - DNA, 23 bp, Artificial Sequence
  human ApoB siRNA sequence
gacagcctcagtgctccactcac

SEQ ID NO: 1422 - DNA, 23 bp, Artificial Sequence
  human ApoB siRNA sequence
acagcctcagtgctccactcaca

SEQ ID NO: 1423 - DNA, 23 bp, Artificial Sequence
  human ApoB siRNA sequence
cagcctcagtgctccactcacat

SEQ ID NO: 1424 - DNA, 23 bp, Artificial Sequence
  human ApoB siRNA sequence
agcctcagtgctccactcacatc

SEQ ID NO: 1425 - DNA, 23 bp, Artificial Sequence
  human ApoB siRNA sequence
gcctcagtgctccactcacatcc

SEQ ID NO: 1426 - DNA, 23 bp, Artificial Sequence
  human ApoB siRNA sequence
cctcagtgctccactcacatcct

SEQ ID NO: 1427 - DNA, 23 bp, Artificial Sequence
  human ApoB siRNA sequence
ctcagtgctccactcacatcctc

SEQ ID NO: 1428 - DNA, 23 bp, Artificial Sequence
  human ApoB siRNA sequence
tcagtgctccactcacatcctcc

SEQ ID NO: 1429 - DNA, 23 bp, Artificial Sequence
  human ApoB siRNA sequence
cagtgctccactcacatcctcca

SEQ ID NO: 1430 - DNA, 23 bp, Artificial Sequence
  human ApoB siRNA sequence
agtgctccactcacatcctccag

SEQ ID NO: 1431 - DNA, 23 bp, Artificial Sequence
  human ApoB siRNA sequence
gtgctccactcacatcctccagt

SEQ ID NO: 1432 - DNA, 23 bp, Artificial Sequence
  human ApoB siRNA sequence
tgctccactcacatcctccagtg

SEQ ID NO: 1433 - DNA, 23 bp, Artificial Sequence
  human ApoB siRNA sequence
gctccactcacatcctccagtgg

SEQ ID NO: 1434 - DNA, 23 bp, Artificial Sequence
  human ApoB siRNA sequence
ctccactcacatcctccagtggc

SEQ ID NO: 1435 - DNA, 23 bp, Artificial Sequence
  human ApoB siRNA sequence
tccactcacatcctccagtggct

SEQ ID NO: 1436 - DNA, 23 bp, Artificial Sequence
  human ApoB siRNA sequence
ccactcacatcctccagtggctg

SEQ ID NO: 1437 - DNA, 23 bp, Artificial Sequence
  human ApoB siRNA sequence
cactcacatcctccagtggctga

SEQ ID NO: 1438 - DNA, 23 bp, Artificial Sequence
  human ApoB siRNA sequence
actcacatcctccagtggctgaa

SEQ ID NO: 1439 - DNA, 23 bp, Artificial Sequence
  human ApoB siRNA sequence
ctcacatcctccagtggctgaaa

SEQ ID NO: 1440 - DNA, 23 bp, Artificial Sequence
  human ApoB siRNA sequence
tcacatcctccagtggctgaaac

SEQ ID NO: 1441 - DNA, 23 bp, Artificial Sequence
  human ApoB siRNA sequence
cacatcctccagtggctgaaacg

SEQ ID NO: 1442 - DNA, 23 bp, Artificial Sequence
  human ApoB siRNA sequence
acatcctccagtggctgaaacgt

SEQ ID NO: 1443 - DNA, 23 bp, Artificial Sequence
  human ApoB siRNA sequence
catcctccagtggctgaaacgtg

SEQ ID NO: 1444 - DNA, 23 bp, Artificial Sequence
  human ApoB siRNA sequence
atcctccagtggctgaaacgtgt

SEQ ID NO: 1445 - DNA, 23 bp, Artificial Sequence
  human ApoB siRNA sequence
tcctccagtggctgaaacgtgtg

SEQ ID NO: 1446 - DNA, 23 bp, Artificial Sequence
  human ApoB siRNA sequence
cctccagtggctgaaacgtgtgc

SEQ ID NO: 1447 - DNA, 23 bp, Artificial Sequence
  human ApoB siRNA sequence
ctccagtggctgaaacgtgtgca

SEQ ID NO: 1448 - DNA, 23 bp, Artificial Sequence
  human ApoB siRNA sequence
tccagtggctgaaacgtgtgcat

SEQ ID NO: 1449 - DNA, 23 bp, Artificial Sequence
  human ApoB siRNA sequence
ccagtggctgaaacgtgtgcatg

SEQ ID NO: 1450 - DNA, 23 bp, Artificial Sequence
  human ApoB siRNA sequence
cagtggctgaaacgtgtgcatgc

SEQ ID NO: 1451 - DNA, 23 bp, Artificial Sequence
  human ApoB siRNA sequence
agtggctgaaacgtgtgcatgcc

SEQ ID NO: 1452 - DNA, 23 bp, Artificial Sequence
  human ApoB siRNA sequence
gtggctgaaacgtgtgcatgcca

SEQ ID NO: 1453 - DNA, 23 bp, Artificial Sequence
  human ApoB siRNA sequence
tggctgaaacgtgtgcatgccaa

SEQ ID NO: 1454 - DNA, 23 bp, Artificial Sequence
  human ApoB siRNA sequence
ggctgaaacgtgtgcatgccaac

SEQ ID NO: 1455 - DNA, 23 bp, Artificial Sequence
  human ApoB siRNA sequence
gctgaaacgtgtgcatgccaacc

SEQ ID NO: 1456 - DNA, 23 bp, Artificial Sequence
  human ApoB siRNA sequence
ctgaaacgtgtgcatgccaaccc

SEQ ID NO: 1457 - DNA, 23 bp, Artificial Sequence
  human ApoB siRNA sequence
tgaaacgtgtgcatgccaacccc

SEQ ID NO: 1458 - DNA, 23 bp, Artificial Sequence
  human ApoB siRNA sequence
gaaacgtgtgcatgccaaccccc

SEQ ID NO: 1459 - DNA, 23 bp, Artificial Sequence
  human ApoB siRNA sequence
aaacgtgtgcatgccaaccccct

SEQ ID NO: 1460 - DNA, 23 bp, Artificial Sequence
  human ApoB siRNA sequence
aacgtgtgcatgccaaccccctt

SEQ ID NO: 1461 - DNA, 23 bp, Artificial Sequence
  human ApoB siRNA sequence
acgtgtgcatgccaacccccttc

SEQ ID NO: 1462 - DNA, 23 bp, Artificial Sequence
  human ApoB siRNA sequence
cgtgtgcatgccaacccccttct

SEQ ID NO: 1463 - DNA, 23 bp, Artificial Sequence
  human ApoB siRNA sequence
gtgtgcatgccaacccccttctg

SEQ ID NO: 1464 - DNA, 23 bp, Artificial Sequence
  human ApoB siRNA sequence
tgtgcatgccaacccccttctga

SEQ ID NO: 1465 - DNA, 23 bp, Artificial Sequence
  human ApoB siRNA sequence
gtgcatgccaacccccttctgat

SEQ ID NO: 1466 - DNA, 23 bp, Artificial Sequence
  human ApoB siRNA sequence
tgcatgccaacccccttctgata

SEQ ID NO: 1467 - DNA, 23 bp, Artificial Sequence
  human ApoB siRNA sequence
gcatgccaacccccttctgatag

SEQ ID NO: 1468 - DNA, 23 bp, Artificial Sequence
  human ApoB siRNA sequence
catgccaacccccttctgataga

SEQ ID NO: 1469 - DNA, 23 bp, Artificial Sequence
  human ApoB siRNA sequence
atgccaacccccttctgatagat

SEQ ID NO: 1470 - DNA, 23 bp, Artificial Sequence
  human ApoB siRNA sequence
tgccaacccccttctgatagatg

SEQ ID NO: 1471 - DNA, 23 bp, Artificial Sequence
  human ApoB siRNA sequence
gccaacccccttctgatagatgt

SEQ ID NO: 1472 - DNA, 23 bp, Artificial Sequence
  human ApoB siRNA sequence
ccaacccccttctgatagatgtg

SEQ ID NO: 1473 - DNA, 23 bp, Artificial Sequence
  human ApoB siRNA sequence
caacccccttctgatagatgtgg

SEQ ID NO: 1474 - DNA, 23 bp, Artificial Sequence
  human ApoB siRNA sequence
aacccccttctgatagatgtggt

SEQ ID NO: 1475 - DNA, 23 bp, Artificial Sequence
  human ApoB siRNA sequence
acccccttctgatagatgtggtc

SEQ ID NO: 1476 - DNA, 23 bp, Artificial Sequence
  human ApoB siRNA sequence
cccccttctgatagatgtggtca

SEQ ID NO: 1477 - DNA, 23 bp, Artificial Sequence
  human ApoB siRNA sequence
ccccttctgatagatgtggtcac

SEQ ID NO: 1478 - DNA, 23 bp, Artificial Sequence
  human ApoB siRNA sequence
cccttctgatagatgtggtcacc

SEQ ID NO: 1479 - DNA, 23 bp, Artificial Sequence
  human ApoB siRNA sequence
ccttctgatagatgtggtcacct

SEQ ID NO: 1480 - DNA, 23 bp, Artificial Sequence
  human ApoB siRNA sequence
cttctgatagatgtggtcaccta

SEQ ID NO: 1481 - DNA, 23 bp, Artificial Sequence
  human ApoB siRNA sequence
ttctgatagatgtggtcacctac

SEQ ID NO: 1482 - DNA, 23 bp, Artificial Sequence
  human ApoB siRNA sequence
tctgatagatgtggtcacctacc

SEQ ID NO: 1483 - DNA, 23 bp, Artificial Sequence
  human ApoB siRNA sequence
ctgatagatgtggtcacctacct

SEQ ID NO: 1484 - DNA, 23 bp, Artificial Sequence
  human ApoB siRNA sequence
tgatagatgtggtcacctacctg

SEQ ID NO: 1485 - DNA, 23 bp, Artificial Sequence
  human ApoB siRNA sequence
gatagatgtggtcacctacctgg

SEQ ID NO: 1486 - DNA, 23 bp, Artificial Sequence
  human ApoB siRNA sequence
atagatgtggtcacctacctggt

SEQ ID NO: 1487 - DNA, 23 bp, Artificial Sequence
  human ApoB siRNA sequence
tagatgtggtcacctacctggtg

SEQ ID NO: 1488 - DNA, 23 bp, Artificial Sequence
  human ApoB siRNA sequence
agatgtggtcacctacctggtgg

SEQ ID NO: 1489 - DNA, 23 bp, Artificial Sequence
  human ApoB siRNA sequence
gatgtggtcacctacctggtggc

SEQ ID NO: 1490 - DNA, 23 bp, Artificial Sequence
  human ApoB siRNA sequence
atgtggtcacctacctggtggcc

SEQ ID NO: 1491 - DNA, 23 bp, Artificial Sequence
  human ApoB siRNA sequence
tgtggtcacctacctggtggccc

SEQ ID NO: 1492 - DNA, 23 bp, Artificial Sequence
  human ApoB siRNA sequence
gtggtcacctacctggtggccct

SEQ ID NO: 1493 - DNA, 23 bp, Artificial Sequence
  human ApoB siRNA sequence
tggtcacctacctggtggccctg

SEQ ID NO: 1494 - DNA, 23 bp, Artificial Sequence
  human ApoB siRNA sequence
ggtcacctacctggtggccctga

SEQ ID NO: 1495 - DNA, 23 bp, Artificial Sequence
  human ApoB siRNA sequence
gtcacctacctggtggccctgat

SEQ ID NO: 1496 - DNA, 23 bp, Artificial Sequence
  human ApoB siRNA sequence
tcacctacctggtggccctgatc

SEQ ID NO: 1497 - DNA, 23 bp, Artificial Sequence
  human ApoB siRNA sequence
cacctacctggtggccctgatcc

SEQ ID NO: 1498 - DNA, 23 bp, Artificial Sequence
  human ApoB siRNA sequence
acctacctggtggccctgatccc

SEQ ID NO: 1499 - DNA, 23 bp, Artificial Sequence
  human ApoB siRNA sequence
cctacctggtggccctgatcccc

SEQ ID NO: 1500 - DNA, 23 bp, Artificial Sequence
  human ApoB siRNA sequence
ctacctggtggccctgatccccg

SEQ ID NO: 1501 - DNA, 23 bp, Artificial Sequence
  human ApoB siRNA sequence
tacctggtggccctgatccccga

SEQ ID NO: 1502 - DNA, 23 bp, Artificial Sequence
  human ApoB siRNA sequence
acctggtggccctgatccccgag

SEQ ID NO: 1503 - DNA, 23 bp, Artificial Sequence
  human ApoB siRNA sequence
cctggtggccctgatccccgagc

SEQ ID NO: 1504 - DNA, 23 bp, Artificial Sequence
  human ApoB siRNA sequence
ctggtggccctgatccccgagcc

SEQ ID NO: 1505 - DNA, 23 bp, Artificial Sequence
  human ApoB siRNA sequence
tggtggccctgatccccgagccc

SEQ ID NO: 1506 - DNA, 23 bp, Artificial Sequence
  human ApoB siRNA sequence
ggtggccctgatccccgagccct

SEQ ID NO: 1507 - DNA, 23 bp, Artificial Sequence
  human ApoB siRNA sequence
gtggccctgatccccgagccctc

SEQ ID NO: 1508 - DNA, 23 bp, Artificial Sequence
  human ApoB siRNA sequence
tggccctgatccccgagccctca

SEQ ID NO: 1509 - DNA, 23 bp, Artificial Sequence
  human ApoB siRNA sequence
ggccctgatccccgagccctcag

SEQ ID NO: 1510 - DNA, 23 bp, Artificial Sequence
  human ApoB siRNA sequence
gccctgatccccgagccctcagc

SEQ ID NO: 1511 - DNA, 23 bp, Artificial Sequence
  human ApoB siRNA sequence
ccctgatccccgagccctcagca

SEQ ID NO: 1512 - DNA, 23 bp, Artificial Sequence
  human ApoB siRNA sequence
cctgatccccgagccctcagcac

SEQ ID NO: 1513 - DNA, 23 bp, Artificial Sequence
  human ApoB siRNA sequence
ctgatccccgagccctcagcaca

SEQ ID NO: 1514 - DNA, 23 bp, Artificial Sequence
  human ApoB siRNA sequence
tgatccccgagccctcagcacag

SEQ ID NO: 1515 - DNA, 23 bp, Artificial Sequence
  human ApoB siRNA sequence
gatccccgagccctcagcacagc

SEQ ID NO: 1516 - DNA, 23 bp, Artificial Sequence
  human ApoB siRNA sequence
atccccgagccctcagcacagca

SEQ ID NO: 1517 - DNA, 23 bp, Artificial Sequence
  human ApoB siRNA sequence
tccccgagccctcagcacagcag

SEQ ID NO: 1518 - DNA, 23 bp, Artificial Sequence
  human ApoB siRNA sequence
ccccgagccctcagcacagcagc

SEQ ID NO: 1519 - DNA, 23 bp, Artificial Sequence
  human ApoB siRNA sequence
cccgagccctcagcacagcagct

SEQ ID NO: 1520 - DNA, 23 bp, Artificial Sequence
  human ApoB siRNA sequence
ccgagccctcagcacagcagctg

SEQ ID NO: 1521 - DNA, 23 bp, Artificial Sequence
  human ApoB siRNA sequence
cgagccctcagcacagcagctgc

SEQ ID NO: 1522 - DNA, 23 bp, Artificial Sequence
  human ApoB siRNA sequence
gagccctcagcacagcagctgcg

SEQ ID NO: 1523 - DNA, 23 bp, Artificial Sequence
  human ApoB siRNA sequence
agccctcagcacagcagctgcga

SEQ ID NO: 1524 - DNA, 23 bp, Artificial Sequence
  human ApoB siRNA sequence
gccctcagcacagcagctgcgag

SEQ ID NO: 1525 - DNA, 23 bp, Artificial Sequence
  human ApoB siRNA sequence
ccctcagcacagcagctgcgaga

SEQ ID NO: 1526 - DNA, 23 bp, Artificial Sequence
  human ApoB siRNA sequence
cctcagcacagcagctgcgagag

SEQ ID NO: 1527 - DNA, 23 bp, Artificial Sequence
  human ApoB siRNA sequence
ctcagcacagcagctgcgagaga

SEQ ID NO: 1528 - DNA, 23 bp, Artificial Sequence
  human ApoB siRNA sequence
tcagcacagcagctgcgagagat

SEQ ID NO: 1529 - DNA, 23 bp, Artificial Sequence
  human ApoB siRNA sequence
cagcacagcagctgcgagagatc

SEQ ID NO: 1530 - DNA, 23 bp, Artificial Sequence
  human ApoB siRNA sequence
agcacagcagctgcgagagatct

SEQ ID NO: 1531 - DNA, 23 bp, Artificial Sequence
  human ApoB siRNA sequence
gcacagcagctgcgagagatctt

SEQ ID NO: 1532 - DNA, 23 bp, Artificial Sequence
  human ApoB siRNA sequence
cacagcagctgcgagagatcttc

SEQ ID NO: 1533 - DNA, 23 bp, Artificial Sequence
  human ApoB siRNA sequence
acagcagctgcgagagatcttca

SEQ ID NO: 1534 - DNA, 23 bp, Artificial Sequence
  human ApoB siRNA sequence
cagcagctgcgagagatcttcaa

SEQ ID NO: 1535 - DNA, 23 bp, Artificial Sequence
  human ApoB siRNA sequence
agcagctgcgagagatcttcaac

SEQ ID NO: 1536 - DNA, 23 bp, Artificial Sequence
  human ApoB siRNA sequence
gcagctgcgagagatcttcaaca

SEQ ID NO: 1537 - DNA, 23 bp, Artificial Sequence
  human ApoB siRNA sequence
cagctgcgagagatcttcaacat

SEQ ID NO: 1538 - DNA, 23 bp, Artificial Sequence
  human ApoB siRNA sequence
agctgcgagagatcttcaacatg

SEQ ID NO: 1539 - DNA, 23 bp, Artificial Sequence
  human ApoB siRNA sequence
gctgcgagagatcttcaacatgg

SEQ ID NO: 1540 - DNA, 23 bp, Artificial Sequence
  human ApoB siRNA sequence
ctgcgagagatcttcaacatggc

SEQ ID NO: 1541 - DNA, 23 bp, Artificial Sequence
  human ApoB siRNA sequence
tgcgagagatcttcaacatggcg

SEQ ID NO: 1542 - DNA, 23 bp, Artificial Sequence
  human ApoB siRNA sequence
gcgagagatcttcaacatggcga

SEQ ID NO: 1543 - DNA, 23 bp, Artificial Sequence
  human ApoB siRNA sequence
cgagagatcttcaacatggcgag

SEQ ID NO: 1544 - DNA, 23 bp, Artificial Sequence
  human ApoB siRNA sequence
gagagatcttcaacatggcgagg

SEQ ID NO: 1545 - DNA, 23 bp, Artificial Sequence
  human ApoB siRNA sequence
agagatcttcaacatggcgaggg

SEQ ID NO: 1546 - DNA, 23 bp, Artificial Sequence
  human ApoB siRNA sequence
gagatcttcaacatggcgaggga

SEQ ID NO: 1547 - DNA, 23 bp, Artificial Sequence
  human ApoB siRNA sequence
agatcttcaacatggcgagggat

SEQ ID NO: 1548 - DNA, 23 bp, Artificial Sequence
  human ApoB siRNA sequence
gatcttcaacatggcgagggatc

SEQ ID NO: 1549 - DNA, 23 bp, Artificial Sequence
  human ApoB siRNA sequence
atcttcaacatggcgagggatca

SEQ ID NO: 1550 - DNA, 23 bp, Artificial Sequence
  human ApoB siRNA sequence
tcttcaacatggcgagggatcag

SEQ ID NO: 1551 - DNA, 23 bp, Artificial Sequence
  human ApoB siRNA sequence
cttcaacatggcgagggatcagc

SEQ ID NO: 1552 - DNA, 23 bp, Artificial Sequence
  human ApoB siRNA sequence
ttcaacatggcgagggatcagcg

SEQ ID NO: 1553 - DNA, 23 bp, Artificial Sequence
  human ApoB siRNA sequence
tcaacatggcgagggatcagcgc

SEQ ID NO: 1554 - DNA, 23 bp, Artificial Sequence
  human ApoB siRNA sequence
caacatggcgagggatcagcgca

SEQ ID NO: 1555 - DNA, 23 bp, Artificial Sequence
  human ApoB siRNA sequence
aacatggcgagggatcagcgcag

SEQ ID NO: 1556 - DNA, 23 bp, Artificial Sequence
  human ApoB siRNA sequence
acatggcgagggatcagcgcagc

SEQ ID NO: 1557 - DNA, 23 bp, Artificial Sequence
  human ApoB siRNA sequence
catggcgagggatcagcgcagcc

SEQ ID NO: 1558 - DNA, 23 bp, Artificial Sequence
  human ApoB siRNA sequence
atggcgagggatcagcgcagccg

SEQ ID NO: 1559 - DNA, 23 bp, Artificial Sequence
  human ApoB siRNA sequence
tggcgagggatcagcgcagccga

SEQ ID NO: 1560 - DNA, 23 bp, Artificial Sequence
  human ApoB siRNA sequence
ggcgagggatcagcgcagccgag

SEQ ID NO: 1561 - DNA, 23 bp, Artificial Sequence
  human ApoB siRNA sequence
gcgagggatcagcgcagccgagc

SEQ ID NO: 1562 - DNA, 23 bp, Artificial Sequence
  human ApoB siRNA sequence
cgagggatcagcgcagccgagcc

SEQ ID NO: 1563 - DNA, 23 bp, Artificial Sequence
  human ApoB siRNA sequence
gagggatcagcgcagccgagcca

SEQ ID NO: 1564 - DNA, 23 bp, Artificial Sequence
  human ApoB siRNA sequence
agggatcagcgcagccgagccac

SEQ ID NO: 1565 - DNA, 23 bp, Artificial Sequence
  human ApoB siRNA sequence
gggatcagcgcagccgagccacc

SEQ ID NO: 1566 - DNA, 23 bp, Artificial Sequence
  human ApoB siRNA sequence
ggatcagcgcagccgagccacct

SEQ ID NO: 1567 - DNA, 23 bp, Artificial Sequence
  human ApoB siRNA sequence
gatcagcgcagccgagccacctt

SEQ ID NO: 1568 - DNA, 23 bp, Artificial Sequence
  human ApoB siRNA sequence
atcagcgcagccgagccaccttg

SEQ ID NO: 1569 - DNA, 23 bp, Artificial Sequence
  human ApoB siRNA sequence
tcagcgcagccgagccaccttgt

SEQ ID NO: 1570 - DNA, 23 bp, Artificial Sequence
  human ApoB siRNA sequence
cagcgcagccgagccaccttgta

SEQ ID NO: 1571 - DNA, 23 bp, Artificial Sequence
  human ApoB siRNA sequence
agcgcagccgagccaccttgtat

SEQ ID NO: 1572 - DNA, 23 bp, Artificial Sequence
  human ApoB siRNA sequence
gcgcagccgagccaccttgtatg

SEQ ID NO: 1573 - DNA, 23 bp, Artificial Sequence
  human ApoB siRNA sequence
cgcagccgagccaccttgtatgc

SEQ ID NO: 1574 - DNA, 23 bp, Artificial Sequence
  human ApoB siRNA sequence
gcagccgagccaccttgtatgcg

SEQ ID NO: 1575 - DNA, 23 bp, Artificial Sequence
  human ApoB siRNA sequence
cagccgagccaccttgtatgcgc

SEQ ID NO: 1576 - DNA, 23 bp, Artificial Sequence
  human ApoB siRNA sequence
agccgagccaccttgtatgcgct

SEQ ID NO: 1577 - DNA, 23 bp, Artificial Sequence
  human ApoB siRNA sequence
gccgagccaccttgtatgcgctg

SEQ ID NO: 1578 - DNA, 23 bp, Artificial Sequence
  human ApoB siRNA sequence
ccgagccaccttgtatgcgctga

SEQ ID NO: 1579 - DNA, 23 bp, Artificial Sequence
  human ApoB siRNA sequence
cgagccaccttgtatgcgctgag

SEQ ID NO: 1580 - DNA, 23 bp, Artificial Sequence
  human ApoB siRNA sequence
gagccaccttgtatgcgctgagc

SEQ ID NO: 1581 - DNA, 23 bp, Artificial Sequence
  human ApoB siRNA sequence
agccaccttgtatgcgctgagcc

SEQ ID NO: 1582 - DNA, 23 bp, Artificial Sequence
  human ApoB siRNA sequence
gccaccttgtatgcgctgagcca

SEQ ID NO: 1583 - DNA, 23 bp, Artificial Sequence
  human ApoB siRNA sequence
ccaccttgtatgcgctgagccac

SEQ ID NO: 1584 - DNA, 23 bp, Artificial Sequence
  human ApoB siRNA sequence
caccttgtatgcgctgagccacg

SEQ ID NO: 1585 - DNA, 23 bp, Artificial Sequence
  human ApoB siRNA sequence
accttgtatgcgctgagccacgc

SEQ ID NO: 1586 - DNA, 23 bp, Artificial Sequence
  human ApoB siRNA sequence
ccttgtatgcgctgagccacgcg

SEQ ID NO: 1587 - DNA, 23 bp, Artificial Sequence
  human ApoB siRNA sequence
cttgtatgcgctgagccacgcgg

SEQ ID NO: 1588 - DNA, 23 bp, Artificial Sequence
  human ApoB siRNA sequence
ttgtatgcgctgagccacgcggt

SEQ ID NO: 1589 - DNA, 23 bp, Artificial Sequence
  human ApoB siRNA sequence
tgtatgcgctgagccacgcggtc

SEQ ID NO: 1590 - DNA, 23 bp, Artificial Sequence
  human ApoB siRNA sequence
gtatgcgctgagccacgcggtca

SEQ ID NO: 1591 - DNA, 23 bp, Artificial Sequence
  human ApoB siRNA sequence
tatgcgctgagccacgcggtcaa

SEQ ID NO: 1592 - DNA, 23 bp, Artificial Sequence
  human ApoB siRNA sequence
atgcgctgagccacgcggtcaac

SEQ ID NO: 1593 - DNA, 23 bp, Artificial Sequence
  human ApoB siRNA sequence
tgcgctgagccacgcggtcaaca

SEQ ID NO: 1594 - DNA, 23 bp, Artificial Sequence
  human ApoB siRNA sequence
gcgctgagccacgcggtcaacaa

SEQ ID NO: 1595 - DNA, 23 bp, Artificial Sequence
  human ApoB siRNA sequence
cgctgagccacgcggtcaacaac

SEQ ID NO: 1596 - DNA, 23 bp, Artificial Sequence
  human ApoB siRNA sequence
gctgagccacgcggtcaacaact

SEQ ID NO: 1597 - DNA, 23 bp, Artificial Sequence
  human ApoB siRNA sequence
ctgagccacgcggtcaacaacta

SEQ ID NO: 1598 - DNA, 23 bp, Artificial Sequence
  human ApoB siRNA sequence
tgagccacgcggtcaacaactat

SEQ ID NO: 1599 - DNA, 23 bp, Artificial Sequence
  human ApoB siRNA sequence
gagccacgcggtcaacaactatc

SEQ ID NO: 1600 - DNA, 23 bp, Artificial Sequence
  human ApoB siRNA sequence
agccacgcggtcaacaactatca

SEQ ID NO: 1601 - DNA, 23 bp, Artificial Sequence
  human ApoB siRNA sequence
gccacgcggtcaacaactatcat

SEQ ID NO: 1602 - DNA, 23 bp, Artificial Sequence
  human ApoB siRNA sequence
ccacgcggtcaacaactatcata

SEQ ID NO: 1603 - DNA, 23 bp, Artificial Sequence
  human ApoB siRNA sequence
cacgcggtcaacaactatcataa

SEQ ID NO: 1604 - DNA, 23 bp, Artificial Sequence
  human ApoB siRNA sequence
acgcggtcaacaactatcataag

SEQ ID NO: 1605 - DNA, 23 bp, Artificial Sequence
  human ApoB siRNA sequence
cgcggtcaacaactatcataaga

SEQ ID NO: 1606 - DNA, 23 bp, Artificial Sequence
  human ApoB siRNA sequence
gcggtcaacaactatcataagac

SEQ ID NO: 1607 - DNA, 23 bp, Artificial Sequence
  human ApoB siRNA sequence
cggtcaacaactatcataagaca

SEQ ID NO: 1608 - DNA, 23 bp, Artificial Sequence
  human ApoB siRNA sequence
ggtcaacaactatcataagacaa

SEQ ID NO: 1609 - DNA, 23 bp, Artificial Sequence
  human ApoB siRNA sequence
gtcaacaactatcataagacaaa

SEQ ID NO: 1610 - DNA, 23 bp, Artificial Sequence
  human ApoB siRNA sequence
tcaacaactatcataagacaaac

SEQ ID NO: 1611 - DNA, 23 bp, Artificial Sequence
  human ApoB siRNA sequence
caacaactatcataagacaaacc

SEQ ID NO: 1612 - DNA, 23 bp, Artificial Sequence
  human ApoB siRNA sequence
aacaactatcataagacaaaccc

SEQ ID NO: 1613 - DNA, 23 bp, Artificial Sequence
  human ApoB siRNA sequence
acaactatcataagacaaaccct

SEQ ID NO: 1614 - DNA, 23 bp, Artificial Sequence
  human ApoB siRNA sequence
caactatcataagacaaacccta

SEQ ID NO: 1615 - DNA, 23 bp, Artificial Sequence
  human ApoB siRNA sequence
aactatcataagacaaaccctac

SEQ ID NO: 1616 - DNA, 23 bp, Artificial Sequence
  human ApoB siRNA sequence
actatcataagacaaaccctaca

SEQ ID NO: 1617 - DNA, 23 bp, Artificial Sequence
  human ApoB siRNA sequence
ctatcataagacaaaccctacag

SEQ ID NO: 1618 - DNA, 23 bp, Artificial Sequence
  human ApoB siRNA sequence
tatcataagacaaaccctacagg

SEQ ID NO: 1619 - DNA, 23 bp, Artificial Sequence
  human ApoB siRNA sequence
atcataagacaaaccctacaggg

SEQ ID NO: 1620 - DNA, 23 bp, Artificial Sequence
  human ApoB siRNA sequence
tcataagacaaaccctacaggga

SEQ ID NO: 1621 - DNA, 23 bp, Artificial Sequence
  human ApoB siRNA sequence
cataagacaaaccctacagggac

SEQ ID NO: 1622 - DNA, 23 bp, Artificial Sequence
  human ApoB siRNA sequence
ataagacaaaccctacagggacc

SEQ ID NO: 1623 - DNA, 23 bp, Artificial Sequence
  human ApoB siRNA sequence
taagacaaaccctacagggaccc

SEQ ID NO: 1624 - DNA, 23 bp, Artificial Sequence
  human ApoB siRNA sequence
aagacaaaccctacagggaccca

SEQ ID NO: 1625 - DNA, 23 bp, Artificial Sequence
  human ApoB siRNA sequence
agacaaaccctacagggacccag

SEQ ID NO: 1626 - DNA, 23 bp, Artificial Sequence
  human ApoB siRNA sequence
gacaaaccctacagggacccagg

SEQ ID NO: 1627 - DNA, 23 bp, Artificial Sequence
  human ApoB siRNA sequence
acaaaccctacagggacccagga

SEQ ID NO: 1628 - DNA, 23 bp, Artificial Sequence
  human ApoB siRNA sequence
caaaccctacagggacccaggag

SEQ ID NO: 1629 - DNA, 23 bp, Artificial Sequence
  human ApoB siRNA sequence
aaaccctacagggacccaggagc

SEQ ID NO: 1630 - DNA, 23 bp, Artificial Sequence
  human ApoB siRNA sequence
aaccctacagggacccaggagct

SEQ ID NO: 1631 - DNA, 23 bp, Artificial Sequence
  human ApoB siRNA sequence
accctacagggacccaggagctg

SEQ ID NO: 1632 - DNA, 23 bp, Artificial Sequence
  human ApoB siRNA sequence
ccctacagggacccaggagctgc

SEQ ID NO: 1633 - DNA, 23 bp, Artificial Sequence
  human ApoB siRNA sequence
cctacagggacccaggagctgct

SEQ ID NO: 1634 - DNA, 23 bp, Artificial Sequence
  human ApoB siRNA sequence
ctacagggacccaggagctgctg

SEQ ID NO: 1635 - DNA, 23 bp, Artificial Sequence
  human ApoB siRNA sequence
tacagggacccaggagctgctgg

SEQ ID NO: 1636 - DNA, 23 bp, Artificial Sequence
  human ApoB siRNA sequence
acagggacccaggagctgctgga

SEQ ID NO: 1637 - DNA, 23 bp, Artificial Sequence
  human ApoB siRNA sequence
cagggacccaggagctgctggac

SEQ ID NO: 1638 - DNA, 23 bp, Artificial Sequence
  human ApoB siRNA sequence
agggacccaggagctgctggaca

SEQ ID NO: 1639 - DNA, 23 bp, Artificial Sequence
  human ApoB siRNA sequence
gggacccaggagctgctggacat

SEQ ID NO: 1640 - DNA, 23 bp, Artificial Sequence
  human ApoB siRNA sequence
ggacccaggagctgctggacatt

SEQ ID NO: 1641 - DNA, 23 bp, Artificial Sequence
  human ApoB siRNA sequence
gacccaggagctgctggacattg

SEQ ID NO: 1642 - DNA, 23 bp, Artificial Sequence
  human ApoB siRNA sequence
acccaggagctgctggacattgc

SEQ ID NO: 1643 - DNA, 23 bp, Artificial Sequence
  human ApoB siRNA sequence
cccaggagctgctggacattgct

SEQ ID NO: 1644 - DNA, 23 bp, Artificial Sequence
  human ApoB siRNA sequence
ccaggagctgctggacattgcta

SEQ ID NO: 1645 - DNA, 23 bp, Artificial Sequence
  human ApoB siRNA sequence
caggagctgctggacattgctaa

SEQ ID NO: 1646 - DNA, 23 bp, Artificial Sequence
  human ApoB siRNA sequence
aggagctgctggacattgctaat

SEQ ID NO: 1647 - DNA, 23 bp, Artificial Sequence
  human ApoB siRNA sequence
ggagctgctggacattgctaatt

SEQ ID NO: 1648 - DNA, 23 bp, Artificial Sequence
  human ApoB siRNA sequence
gagctgctggacattgctaatta

SEQ ID NO: 1649 - DNA, 23 bp, Artificial Sequence
  human ApoB siRNA sequence
agctgctggacattgctaattac

SEQ ID NO: 1650 - DNA, 23 bp, Artificial Sequence
  human ApoB siRNA sequence
gctgctggacattgctaattacc

SEQ ID NO: 1651 - DNA, 23 bp, Artificial Sequence
  human ApoB siRNA sequence
ctgctggacattgctaattacct

SEQ ID NO: 1652 - DNA, 23 bp, Artificial Sequence
  human ApoB siRNA sequence
tgctggacattgctaattacctg

SEQ ID NO: 1653 - DNA, 23 bp, Artificial Sequence
  human ApoB siRNA sequence
gctggacattgctaattacctga

SEQ ID NO: 1654 - DNA, 23 bp, Artificial Sequence
  human ApoB siRNA sequence
ctggacattgctaattacctgat

SEQ ID NO: 1655 - DNA, 23 bp, Artificial Sequence
  human ApoB siRNA sequence
tggacattgctaattacctgatg

SEQ ID NO: 1656 - DNA, 23 bp, Artificial Sequence
  human ApoB siRNA sequence
ggacattgctaattacctgatgg

SEQ ID NO: 1657 - DNA, 23 bp, Artificial Sequence
  human ApoB siRNA sequence
gacattgctaattacctgatgga

SEQ ID NO: 1658 - DNA, 23 bp, Artificial Sequence
  human ApoB siRNA sequence
acattgctaattacctgatggaa

SEQ ID NO: 1659 - DNA, 23 bp, Artificial Sequence
  human ApoB siRNA sequence
cattgctaattacctgatggaac

SEQ ID NO: 1660 - DNA, 23 bp, Artificial Sequence
  human ApoB siRNA sequence
attgctaattacctgatggaaca

SEQ ID NO: 1661 - DNA, 23 bp, Artificial Sequence
  human ApoB siRNA sequence
ttgctaattacctgatggaacag

SEQ ID NO: 1662 - DNA, 23 bp, Artificial Sequence
  human ApoB siRNA sequence
tgctaattacctgatggaacaga

SEQ ID NO: 1663 - DNA, 23 bp, Artificial Sequence
  human ApoB siRNA sequence
gctaattacctgatggaacagat

SEQ ID NO: 1664 - DNA, 23 bp, Artificial Sequence
  human ApoB siRNA sequence
ctaattacctgatggaacagatt

SEQ ID NO: 1665 - DNA, 23 bp, Artificial Sequence
  human ApoB siRNA sequence
taattacctgatggaacagattc

SEQ ID NO: 1666 - DNA, 23 bp, Artificial Sequence
  human ApoB siRNA sequence
aattacctgatggaacagattca

SEQ ID NO: 1667 - DNA, 23 bp, Artificial Sequence
  human ApoB siRNA sequence
attacctgatggaacagattcaa

SEQ ID NO: 1668 - DNA, 23 bp, Artificial Sequence
  human ApoB siRNA sequence
ttacctgatggaacagattcaag

SEQ ID NO: 1669 - DNA, 23 bp, Artificial Sequence
  human ApoB siRNA sequence
tacctgatggaacagattcaaga

SEQ ID NO: 1670 - DNA, 23 bp, Artificial Sequence
  human ApoB siRNA sequence
acctgatggaacagattcaagat

SEQ ID NO: 1671 - DNA, 23 bp, Artificial Sequence
  human ApoB siRNA sequence
cctgatggaacagattcaagatg

SEQ ID NO: 1672 - DNA, 23 bp, Artificial Sequence
  human ApoB siRNA sequence
ctgatggaacagattcaagatga

SEQ ID NO: 1673 - DNA, 23 bp, Artificial Sequence
  human ApoB siRNA sequence
tgatggaacagattcaagatgac

SEQ ID NO: 1674 - DNA, 23 bp, Artificial Sequence
  human ApoB siRNA sequence
gatggaacagattcaagatgact

SEQ ID NO: 1675 - DNA, 23 bp, Artificial Sequence
  human ApoB siRNA sequence
atggaacagattcaagatgactg

SEQ ID NO: 1676 - DNA, 23 bp, Artificial Sequence
  human ApoB siRNA sequence
tggaacagattcaagatgactgc

SEQ ID NO: 1677 - DNA, 23 bp, Artificial Sequence
  human ApoB siRNA sequence
ggaacagattcaagatgactgca

SEQ ID NO: 1678 - DNA, 23 bp, Artificial Sequence
  human ApoB siRNA sequence
gaacagattcaagatgactgcac

SEQ ID NO: 1679 - DNA, 23 bp, Artificial Sequence
  human ApoB siRNA sequence
aacagattcaagatgactgcact

SEQ ID NO: 1680 - DNA, 23 bp, Artificial Sequence
  human ApoB siRNA sequence
acagattcaagatgactgcactg

SEQ ID NO: 1681 - DNA, 23 bp, Artificial Sequence
  human ApoB siRNA sequence
cagattcaagatgactgcactgg

SEQ ID NO: 1682 - DNA, 23 bp, Artificial Sequence
  human ApoB siRNA sequence
agattcaagatgactgcactggg

SEQ ID NO: 1683 - DNA, 23 bp, Artificial Sequence
  human ApoB siRNA sequence
gattcaagatgactgcactgggg

SEQ ID NO: 1684 - DNA, 23 bp, Artificial Sequence
  human ApoB siRNA sequence
attcaagatgactgcactgggga

SEQ ID NO: 1685 - DNA, 23 bp, Artificial Sequence
  human ApoB siRNA sequence
ttcaagatgactgcactggggat

SEQ ID NO: 1686 - DNA, 23 bp, Artificial Sequence
  human ApoB siRNA sequence
tcaagatgactgcactggggatg

SEQ ID NO: 1687 - DNA, 23 bp, Artificial Sequence
  human ApoB siRNA sequence
caagatgactgcactggggatga

SEQ ID NO: 1688 - DNA, 23 bp, Artificial Sequence
  human ApoB siRNA sequence
aagatgactgcactggggatgaa

SEQ ID NO: 1689 - DNA, 23 bp, Artificial Sequence
  human ApoB siRNA sequence
agatgactgcactggggatgaag

SEQ ID NO: 1690 - DNA, 23 bp, Artificial Sequence
  human ApoB siRNA sequence
gatgactgcactggggatgaaga

SEQ ID NO: 1691 - DNA, 23 bp, Artificial Sequence
  human ApoB siRNA sequence
atgactgcactggggatgaagat

SEQ ID NO: 1692 - DNA, 23 bp, Artificial Sequence
  human ApoB siRNA sequence
tgactgcactggggatgaagatt

SEQ ID NO: 1693 - DNA, 23 bp, Artificial Sequence
  human ApoB siRNA sequence
gactgcactggggatgaagatta

SEQ ID NO: 1694 - DNA, 23 bp, Artificial Sequence
  human ApoB siRNA sequence
actgcactggggatgaagattac

SEQ ID NO: 1695 - DNA, 23 bp, Artificial Sequence
  human ApoB siRNA sequence
ctgcactggggatgaagattaca

SEQ ID NO: 1696 - DNA, 23 bp, Artificial Sequence
  human ApoB siRNA sequence
tgcactggggatgaagattacac

SEQ ID NO: 1697 - DNA, 23 bp, Artificial Sequence
  human ApoB siRNA sequence
gcactggggatgaagattacacc

SEQ ID NO: 1698 - DNA, 23 bp, Artificial Sequence
  human ApoB siRNA sequence
cactggggatgaagattacacct

SEQ ID NO: 1699 - DNA, 23 bp, Artificial Sequence
  human ApoB siRNA sequence
actggggatgaagattacaccta

SEQ ID NO: 1700 - DNA, 23 bp, Artificial Sequence
  human ApoB siRNA sequence
ctggggatgaagattacacctat

SEQ ID NO: 1701 - DNA, 23 bp, Artificial Sequence
  human ApoB siRNA sequence
tggggatgaagattacacctatt

SEQ ID NO: 1702 - DNA, 23 bp, Artificial Sequence
  human ApoB siRNA sequence
ggggatgaagattacacctattt

SEQ ID NO: 1703 - DNA, 23 bp, Artificial Sequence
  human ApoB siRNA sequence
gggatgaagattacacctatttg

SEQ ID NO: 1704 - DNA, 23 bp, Artificial Sequence
  human ApoB siRNA sequence
ggatgaagattacacctatttga

SEQ ID NO: 1705 - DNA, 23 bp, Artificial Sequence
  human ApoB siRNA sequence
gatgaagattacacctatttgat

SEQ ID NO: 1706 - DNA, 23 bp, Artificial Sequence
  human ApoB siRNA sequence
atgaagattacacctatttgatt

SEQ ID NO: 1707 - DNA, 23 bp, Artificial Sequence
  human ApoB siRNA sequence
tgaagattacacctatttgattc

SEQ ID NO: 1708 - DNA, 23 bp, Artificial Sequence
  human ApoB siRNA sequence
gaagattacacctatttgattct

SEQ ID NO: 1709 - DNA, 23 bp, Artificial Sequence
  human ApoB siRNA sequence
aagattacacctatttgattctg

SEQ ID NO: 1710 - DNA, 23 bp, Artificial Sequence
  human ApoB siRNA sequence
agattacacctatttgattctgc

SEQ ID NO: 1711 - DNA, 23 bp, Artificial Sequence
  human ApoB siRNA sequence
gattacacctatttgattctgcg

SEQ ID NO: 1712 - DNA, 23 bp, Artificial Sequence
  human ApoB siRNA sequence
attacacctatttgattctgcgg

SEQ ID NO: 1713 - DNA, 23 bp, Artificial Sequence
  human ApoB siRNA sequence
ttacacctatttgattctgcggg

SEQ ID NO: 1714 - DNA, 23 bp, Artificial Sequence
  human ApoB siRNA sequence
tacacctatttgattctgcgggt

SEQ ID NO: 1715 - DNA, 23 bp, Artificial Sequence
  human ApoB siRNA sequence
acacctatttgattctgcgggtc

SEQ ID NO: 1716 - DNA, 23 bp, Artificial Sequence
  human ApoB siRNA sequence
cacctatttgattctgcgggtca

SEQ ID NO: 1717 - DNA, 23 bp, Artificial Sequence
  human ApoB siRNA sequence
acctatttgattctgcgggtcat

SEQ ID NO: 1718 - DNA, 23 bp, Artificial Sequence
  human ApoB siRNA sequence
cctatttgattctgcgggtcatt

SEQ ID NO: 1719 - DNA, 23 bp, Artificial Sequence
  human ApoB siRNA sequence
ctatttgattctgcgggtcattg

SEQ ID NO: 1720 - DNA, 23 bp, Artificial Sequence
  human ApoB siRNA sequence
tatttgattctgcgggtcattgg

SEQ ID NO: 1721 - DNA, 23 bp, Artificial Sequence
  human ApoB siRNA sequence
atttgattctgcgggtcattgga

SEQ ID NO: 1722 - DNA, 23 bp, Artificial Sequence
  human ApoB siRNA sequence
tttgattctgcgggtcattggaa

SEQ ID NO: 1723 - DNA, 23 bp, Artificial Sequence
  human ApoB siRNA sequence
ttgattctgcgggtcattggaaa

SEQ ID NO: 1724 - DNA, 23 bp, Artificial Sequence
  human ApoB siRNA sequence
tgattctgcgggtcattggaaat

SEQ ID NO: 1725 - DNA, 23 bp, Artificial Sequence
  human ApoB siRNA sequence
gattctgcgggtcattggaaata

SEQ ID NO: 1726 - DNA, 23 bp, Artificial Sequence
  human ApoB siRNA sequence
attctgcgggtcattggaaatat

SEQ ID NO: 1727 - DNA, 23 bp, Artificial Sequence
  human ApoB siRNA sequence
ttctgcgggtcattggaaatatg

SEQ ID NO: 1728 - DNA, 23 bp, Artificial Sequence
  human ApoB siRNA sequence
tctgcgggtcattggaaatatgg

SEQ ID NO: 1729 - DNA, 23 bp, Artificial Sequence
  human ApoB siRNA sequence
ctgcgggtcattggaaatatggg

SEQ ID NO: 1730 - DNA, 23 bp, Artificial Sequence
  human ApoB siRNA sequence
tgcgggtcattggaaatatgggc

SEQ ID NO: 1731 - DNA, 23 bp, Artificial Sequence
  human ApoB siRNA sequence
gcgggtcattggaaatatgggcc

SEQ ID NO: 1732 - DNA, 23 bp, Artificial Sequence
  human ApoB siRNA sequence
cgggtcattggaaatatgggcca

SEQ ID NO: 1733 - DNA, 23 bp, Artificial Sequence
  human ApoB siRNA sequence
gggtcattggaaatatgggccaa

SEQ ID NO: 1734 - DNA, 23 bp, Artificial Sequence
  human ApoB siRNA sequence
ggtcattggaaatatgggccaaa

SEQ ID NO: 1735 - DNA, 23 bp, Artificial Sequence
  human ApoB siRNA sequence
gtcattggaaatatgggccaaac

SEQ ID NO: 1736 - DNA, 23 bp, Artificial Sequence
  human ApoB siRNA sequence
tcattggaaatatgggccaaacc

SEQ ID NO: 1737 - DNA, 23 bp, Artificial Sequence
  human ApoB siRNA sequence
cattggaaatatgggccaaacca

SEQ ID NO: 1738 - DNA, 23 bp, Artificial Sequence
  human ApoB siRNA sequence
attggaaatatgggccaaaccat

SEQ ID NO: 1739 - DNA, 23 bp, Artificial Sequence
  human ApoB siRNA sequence
ttggaaatatgggccaaaccatg

SEQ ID NO: 1740 - DNA, 23 bp, Artificial Sequence
  human ApoB siRNA sequence
tggaaatatgggccaaaccatgg

SEQ ID NO: 1741 - DNA, 23 bp, Artificial Sequence
  human ApoB siRNA sequence
ggaaatatgggccaaaccatgga

SEQ ID NO: 1742 - DNA, 23 bp, Artificial Sequence
  human ApoB siRNA sequence
gaaatatgggccaaaccatggag

SEQ ID NO: 1743 - DNA, 23 bp, Artificial Sequence
  human ApoB siRNA sequence
aaatatgggccaaaccatggagc

SEQ ID NO: 1744 - DNA, 23 bp, Artificial Sequence
  human ApoB siRNA sequence
aatatgggccaaaccatggagca

SEQ ID NO: 1745 - DNA, 23 bp, Artificial Sequence
  human ApoB siRNA sequence
atatgggccaaaccatggagcag

SEQ ID NO: 1746 - DNA, 23 bp, Artificial Sequence
  human ApoB siRNA sequence
tatgggccaaaccatggagcagt

SEQ ID NO: 1747 - DNA, 23 bp, Artificial Sequence
  human ApoB siRNA sequence
atgggccaaaccatggagcagtt

SEQ ID NO: 1748 - DNA, 23 bp, Artificial Sequence
  human ApoB siRNA sequence
tgggccaaaccatggagcagtta

SEQ ID NO: 1749 - DNA, 23 bp, Artificial Sequence
  human ApoB siRNA sequence
gggccaaaccatggagcagttaa

SEQ ID NO: 1750 - DNA, 23 bp, Artificial Sequence
  human ApoB siRNA sequence
ggccaaaccatggagcagttaac

SEQ ID NO: 1751 - DNA, 23 bp, Artificial Sequence
  human ApoB siRNA sequence
gccaaaccatggagcagttaact

SEQ ID NO: 1752 - DNA, 23 bp, Artificial Sequence
  human ApoB siRNA sequence
ccaaaccatggagcagttaactc

SEQ ID NO: 1753 - DNA, 23 bp, Artificial Sequence
  human ApoB siRNA sequence
caaaccatggagcagttaactcc

SEQ ID NO: 1754 - DNA, 23 bp, Artificial Sequence
  human ApoB siRNA sequence
aaaccatggagcagttaactcca

SEQ ID NO: 1755 - DNA, 23 bp, Artificial Sequence
  human ApoB siRNA sequence
aaccatggagcagttaactccag

SEQ ID NO: 1756 - DNA, 23 bp, Artificial Sequence
  human ApoB siRNA sequence
accatggagcagttaactccaga

SEQ ID NO: 1757 - DNA, 23 bp, Artificial Sequence
  human ApoB siRNA sequence
ccatggagcagttaactccagaa

SEQ ID NO: 1758 - DNA, 23 bp, Artificial Sequence
  human ApoB siRNA sequence
catggagcagttaactccagaac

SEQ ID NO: 1759 - DNA, 23 bp, Artificial Sequence
  human ApoB siRNA sequence
atggagcagttaactccagaact

SEQ ID NO: 1760 - DNA, 23 bp, Artificial Sequence
  human ApoB siRNA sequence
tggagcagttaactccagaactc

SEQ ID NO: 1761 - DNA, 23 bp, Artificial Sequence
  human ApoB siRNA sequence
ggagcagttaactccagaactca

SEQ ID NO: 1762 - DNA, 23 bp, Artificial Sequence
  human ApoB siRNA sequence
gagcagttaactccagaactcaa

SEQ ID NO: 1763 - DNA, 23 bp, Artificial Sequence
  human ApoB siRNA sequence
agcagttaactccagaactcaag

SEQ ID NO: 1764 - DNA, 23 bp, Artificial Sequence
  human ApoB siRNA sequence
gcagttaactccagaactcaagt

SEQ ID NO: 1765 - DNA, 23 bp, Artificial Sequence
  human ApoB siRNA sequence
cagttaactccagaactcaagtc

SEQ ID NO: 1766 - DNA, 23 bp, Artificial Sequence
  human ApoB siRNA sequence
agttaactccagaactcaagtct

SEQ ID NO: 1767 - DNA, 23 bp, Artificial Sequence
  human ApoB siRNA sequence
gttaactccagaactcaagtctt

SEQ ID NO: 1768 - DNA, 23 bp, Artificial Sequence
  human ApoB siRNA sequence
ttaactccagaactcaagtcttc

SEQ ID NO: 1769 - DNA, 23 bp, Artificial Sequence
  human ApoB siRNA sequence
taactccagaactcaagtcttca

SEQ ID NO: 1770 - DNA, 23 bp, Artificial Sequence
  human ApoB siRNA sequence
aactccagaactcaagtcttcaa

SEQ ID NO: 1771 - DNA, 23 bp, Artificial Sequence
  human ApoB siRNA sequence
actccagaactcaagtcttcaat

SEQ ID NO: 1772 - DNA, 23 bp, Artificial Sequence
  human ApoB siRNA sequence
ctccagaactcaagtcttcaatc

SEQ ID NO: 1773 - DNA, 23 bp, Artificial Sequence
  human ApoB siRNA sequence
tccagaactcaagtcttcaatcc

SEQ ID NO: 1774 - DNA, 23 bp, Artificial Sequence
  human ApoB siRNA sequence
ccagaactcaagtcttcaatcct

SEQ ID NO: 1775 - DNA, 23 bp, Artificial Sequence
  human ApoB siRNA sequence
cagaactcaagtcttcaatcctc

SEQ ID NO: 1776 - DNA, 23 bp, Artificial Sequence
  human ApoB siRNA sequence
agaactcaagtcttcaatcctca

SEQ ID NO: 1777 - DNA, 23 bp, Artificial Sequence
  human ApoB siRNA sequence
gaactcaagtcttcaatcctcaa

SEQ ID NO: 1778 - DNA, 23 bp, Artificial Sequence
  human ApoB siRNA sequence
aactcaagtcttcaatcctcaaa

SEQ ID NO: 1779 - DNA, 23 bp, Artificial Sequence
  human ApoB siRNA sequence
actcaagtcttcaatcctcaaat

SEQ ID NO: 1780 - DNA, 23 bp, Artificial Sequence
  human ApoB siRNA sequence
ctcaagtcttcaatcctcaaatg

SEQ ID NO: 1781 - DNA, 23 bp, Artificial Sequence
  human ApoB siRNA sequence
tcaagtcttcaatcctcaaatgt

SEQ ID NO: 1782 - DNA, 23 bp, Artificial Sequence
  human ApoB siRNA sequence
caagtcttcaatcctcaaatgtg

SEQ ID NO: 1783 - DNA, 23 bp, Artificial Sequence
  human ApoB siRNA sequence
aagtcttcaatcctcaaatgtgt

SEQ ID NO: 1784 - DNA, 23 bp, Artificial Sequence
  human ApoB siRNA sequence
agtcttcaatcctcaaatgtgtc

SEQ ID NO: 1785 - DNA, 23 bp, Artificial Sequence
  human ApoB siRNA sequence
gtcttcaatcctcaaatgtgtcc

SEQ ID NO: 1786 - DNA, 23 bp, Artificial Sequence
  human ApoB siRNA sequence
tcttcaatcctcaaatgtgtcca

SEQ ID NO: 1787 - DNA, 23 bp, Artificial Sequence
  human ApoB siRNA sequence
cttcaatcctcaaatgtgtccaa

SEQ ID NO: 1788 - DNA, 23 bp, Artificial Sequence
  human ApoB siRNA sequence
ttcaatcctcaaatgtgtccaaa

SEQ ID NO: 1789 - DNA, 23 bp, Artificial Sequence
  human ApoB siRNA sequence
tcaatcctcaaatgtgtccaaag

SEQ ID NO: 1790 - DNA, 23 bp, Artificial Sequence
  human ApoB siRNA sequence
caatcctcaaatgtgtccaaagt

SEQ ID NO: 1791 - DNA, 23 bp, Artificial Sequence
  human ApoB siRNA sequence
aatcctcaaatgtgtccaaagta

SEQ ID NO: 1792 - DNA, 23 bp, Artificial Sequence
  human ApoB siRNA sequence
atcctcaaatgtgtccaaagtac

SEQ ID NO: 1793 - DNA, 23 bp, Artificial Sequence
  human ApoB siRNA sequence
tcctcaaatgtgtccaaagtaca

SEQ ID NO: 1794 - DNA, 23 bp, Artificial Sequence
  human ApoB siRNA sequence
cctcaaatgtgtccaaagtacaa

SEQ ID NO: 1795 - DNA, 23 bp, Artificial Sequence
  human ApoB siRNA sequence
ctcaaatgtgtccaaagtacaaa

SEQ ID NO: 1796 - DNA, 23 bp, Artificial Sequence
  human ApoB siRNA sequence
tcaaatgtgtccaaagtacaaag

SEQ ID NO: 1797 - DNA, 23 bp, Artificial Sequence
  human ApoB siRNA sequence
caaatgtgtccaaagtacaaagc

SEQ ID NO: 1798 - DNA, 23 bp, Artificial Sequence
  human ApoB siRNA sequence
aaatgtgtccaaagtacaaagcc

SEQ ID NO: 1799 - DNA, 23 bp, Artificial Sequence
  human ApoB siRNA sequence
aatgtgtccaaagtacaaagcca

SEQ ID NO: 1800 - DNA, 23 bp, Artificial Sequence
  human ApoB siRNA sequence
atgtgtccaaagtacaaagccat

SEQ ID NO: 1801 - DNA, 23 bp, Artificial Sequence
  human ApoB siRNA sequence
tgtgtccaaagtacaaagccatc

SEQ ID NO: 1802 - DNA, 23 bp, Artificial Sequence
  human ApoB siRNA sequence
gtgtccaaagtacaaagccatca

SEQ ID NO: 1803 - DNA, 23 bp, Artificial Sequence
  human ApoB siRNA sequence
tgtccaaagtacaaagccatcac

SEQ ID NO: 1804 - DNA, 23 bp, Artificial Sequence
  human ApoB siRNA sequence
gtccaaagtacaaagccatcact

SEQ ID NO: 1805 - DNA, 23 bp, Artificial Sequence
  human ApoB siRNA sequence
tccaaagtacaaagccatcactg

SEQ ID NO: 1806 - DNA, 23 bp, Artificial Sequence
  human ApoB siRNA sequence
ccaaagtacaaagccatcactga

SEQ ID NO: 1807 - DNA, 23 bp, Artificial Sequence
  human ApoB siRNA sequence
caaagtacaaagccatcactgat

SEQ ID NO: 1808 - DNA, 23 bp, Artificial Sequence
  human ApoB siRNA sequence
aaagtacaaagccatcactgatg

SEQ ID NO: 1809 - DNA, 23 bp, Artificial Sequence
  human ApoB siRNA sequence
aagtacaaagccatcactgatga

SEQ ID NO: 1810 - DNA, 23 bp, Artificial Sequence
  human ApoB siRNA sequence
agtacaaagccatcactgatgat

SEQ ID NO: 1811 - DNA, 23 bp, Artificial Sequence
  human ApoB siRNA sequence
gtacaaagccatcactgatgatc

SEQ ID NO: 1812 - DNA, 23 bp, Artificial Sequence
  human ApoB siRNA sequence
tacaaagccatcactgatgatcc

SEQ ID NO: 1813 - DNA, 23 bp, Artificial Sequence
  human ApoB siRNA sequence
acaaagccatcactgatgatcca

SEQ ID NO: 1814 - DNA, 23 bp, Artificial Sequence
  human ApoB siRNA sequence
caaagccatcactgatgatccag

SEQ ID NO: 1815 - DNA, 23 bp, Artificial Sequence
  human ApoB siRNA sequence
aaagccatcactgatgatccaga

SEQ ID NO: 1816 - DNA, 23 bp, Artificial Sequence
  human ApoB siRNA sequence
aagccatcactgatgatccagaa

SEQ ID NO: 1817 - DNA, 23 bp, Artificial Sequence
  human ApoB siRNA sequence
agccatcactgatgatccagaaa

SEQ ID NO: 1818 - DNA, 23 bp, Artificial Sequence
  human ApoB siRNA sequence
gccatcactgatgatccagaaag

SEQ ID NO: 1819 - DNA, 23 bp, Artificial Sequence
  human ApoB siRNA sequence
ccatcactgatgatccagaaagc

SEQ ID NO: 1820 - DNA, 23 bp, Artificial Sequence
  human ApoB siRNA sequence
catcactgatgatccagaaagct

SEQ ID NO: 1821 - DNA, 23 bp, Artificial Sequence
  human ApoB siRNA sequence
atcactgatgatccagaaagctg

SEQ ID NO: 1822 - DNA, 23 bp, Artificial Sequence
  human ApoB siRNA sequence
tcactgatgatccagaaagctgc

SEQ ID NO: 1823 - DNA, 23 bp, Artificial Sequence
  human ApoB siRNA sequence
cactgatgatccagaaagctgcc

SEQ ID NO: 1824 - DNA, 23 bp, Artificial Sequence
  human ApoB siRNA sequence
actgatgatccagaaagctgcca

SEQ ID NO: 1825 - DNA, 23 bp, Artificial Sequence
  human ApoB siRNA sequence
ctgatgatccagaaagctgccat

SEQ ID NO: 1826 - DNA, 23 bp, Artificial Sequence
  human ApoB siRNA sequence
tgatgatccagaaagctgccatc

SEQ ID NO: 1827 - DNA, 23 bp, Artificial Sequence
  human ApoB siRNA sequence
gatgatccagaaagctgccatcc

SEQ ID NO: 1828 - DNA, 23 bp, Artificial Sequence
  human ApoB siRNA sequence
atgatccagaaagctgccatcca

SEQ ID NO: 1829 - DNA, 23 bp, Artificial Sequence
  human ApoB siRNA sequence
tgatccagaaagctgccatccag

SEQ ID NO: 1830 - DNA, 23 bp, Artificial Sequence
  human ApoB siRNA sequence
gatccagaaagctgccatccagg

SEQ ID NO: 1831 - DNA, 23 bp, Artificial Sequence
  human ApoB siRNA sequence
atccagaaagctgccatccaggc

SEQ ID NO: 1832 - DNA, 23 bp, Artificial Sequence
  human ApoB siRNA sequence
tccagaaagctgccatccaggct

SEQ ID NO: 1833 - DNA, 23 bp, Artificial Sequence
  human ApoB siRNA sequence
ccagaaagctgccatccaggctc

SEQ ID NO: 1834 - DNA, 23 bp, Artificial Sequence
  human ApoB siRNA sequence
cagaaagctgccatccaggctct

SEQ ID NO: 1835 - DNA, 23 bp, Artificial Sequence
  human ApoB siRNA sequence
agaaagctgccatccaggctctg

SEQ ID NO: 1836 - DNA, 23 bp, Artificial Sequence
  human ApoB siRNA sequence
gaaagctgccatccaggctctgc

SEQ ID NO: 1837 - DNA, 23 bp, Artificial Sequence
  human ApoB siRNA sequence
aaagctgccatccaggctctgcg

SEQ ID NO: 1838 - DNA, 23 bp, Artificial Sequence
  human ApoB siRNA sequence
aagctgccatccaggctctgcgg

SEQ ID NO: 1839 - DNA, 23 bp, Artificial Sequence
  human ApoB siRNA sequence
agctgccatccaggctctgcgga

SEQ ID NO: 1840 - DNA, 23 bp, Artificial Sequence
  human ApoB siRNA sequence
gctgccatccaggctctgcggaa

SEQ ID NO: 1841 - DNA, 23 bp, Artificial Sequence
  human ApoB siRNA sequence
ctgccatccaggctctgcggaaa

SEQ ID NO: 1842 - DNA, 23 bp, Artificial Sequence
  human ApoB siRNA sequence
tgccatccaggctctgcggaaaa

SEQ ID NO: 1843 - DNA, 23 bp, Artificial Sequence
  human ApoB siRNA sequence
gccatccaggctctgcggaaaat

SEQ ID NO: 1844 - DNA, 23 bp, Artificial Sequence
  human ApoB siRNA sequence
ccatccaggctctgcggaaaatg

SEQ ID NO: 1845 - DNA, 23 bp, Artificial Sequence
  human ApoB siRNA sequence
catccaggctctgcggaaaatgg

SEQ ID NO: 1846 - DNA, 23 bp, Artificial Sequence
  human ApoB siRNA sequence
atccaggctctgcggaaaatgga

SEQ ID NO: 1847 - DNA, 23 bp, Artificial Sequence
  human ApoB siRNA sequence
tccaggctctgcggaaaatggag

SEQ ID NO: 1848 - DNA, 23 bp, Artificial Sequence
  human ApoB siRNA sequence
ccaggctctgcggaaaatggagc

SEQ ID NO: 1849 - DNA, 23 bp, Artificial Sequence
  human ApoB siRNA sequence
caggctctgcggaaaatggagcc

SEQ ID NO: 1850 - DNA, 23 bp, Artificial Sequence
  human ApoB siRNA sequence
aggctctgcggaaaatggagcct

SEQ ID NO: 1851 - DNA, 23 bp, Artificial Sequence
  human ApoB siRNA sequence
ggctctgcggaaaatggagccta

SEQ ID NO: 1852 - DNA, 23 bp, Artificial Sequence
  human ApoB siRNA sequence
gctctgcggaaaatggagcctaa

SEQ ID NO: 1853 - DNA, 23 bp, Artificial Sequence
  human ApoB siRNA sequence
ctctgcggaaaatggagcctaaa

SEQ ID NO: 1854 - DNA, 23 bp, Artificial Sequence
  human ApoB siRNA sequence
tctgcggaaaatggagcctaaag

SEQ ID NO: 1855 - DNA, 23 bp, Artificial Sequence
  human ApoB siRNA sequence
ctgcggaaaatggagcctaaaga

SEQ ID NO: 1856 - DNA, 23 bp, Artificial Sequence
  human ApoB siRNA sequence
tgcggaaaatggagcctaaagac

SEQ ID NO: 1857 - DNA, 23 bp, Artificial Sequence
  human ApoB siRNA sequence
gcggaaaatggagcctaaagaca

SEQ ID NO: 1858 - DNA, 23 bp, Artificial Sequence
  human ApoB siRNA sequence
cggaaaatggagcctaaagacaa

SEQ ID NO: 1859 - DNA, 23 bp, Artificial Sequence
  human ApoB siRNA sequence
ggaaaatggagcctaaagacaag

SEQ ID NO: 1860 - DNA, 23 bp, Artificial Sequence
  human ApoB siRNA sequence
gaaaatggagcctaaagacaagg

SEQ ID NO: 1861 - DNA, 23 bp, Artificial Sequence
  human ApoB siRNA sequence
aaaatggagcctaaagacaagga

SEQ ID NO: 1862 - DNA, 23 bp, Artificial Sequence
  human ApoB siRNA sequence
aaatggagcctaaagacaaggac

SEQ ID NO: 1863 - DNA, 23 bp, Artificial Sequence
  human ApoB siRNA sequence
aatggagcctaaagacaaggacc

SEQ ID NO: 1864 - DNA, 23 bp, Artificial Sequence
  human ApoB siRNA sequence
atggagcctaaagacaaggacca

SEQ ID NO: 1865 - DNA, 23 bp, Artificial Sequence
  human ApoB siRNA sequence
tggagcctaaagacaaggaccag

SEQ ID NO: 1866 - DNA, 23 bp, Artificial Sequence
  human ApoB siRNA sequence
ggagcctaaagacaaggaccagg

SEQ ID NO: 1867 - DNA, 23 bp, Artificial Sequence
  human ApoB siRNA sequence
gagcctaaagacaaggaccagga

SEQ ID NO: 1868 - DNA, 23 bp, Artificial Sequence
  human ApoB siRNA sequence
agcctaaagacaaggaccaggag

SEQ ID NO: 1869 - DNA, 23 bp, Artificial Sequence
  human ApoB siRNA sequence
gcctaaagacaaggaccaggagg

SEQ ID NO: 1870 - DNA, 23 bp, Artificial Sequence
  human ApoB siRNA sequence
cctaaagacaaggaccaggaggt

SEQ ID NO: 1871 - DNA, 23 bp, Artificial Sequence
  human ApoB siRNA sequence
ctaaagacaaggaccaggaggtt

SEQ ID NO: 1872 - DNA, 23 bp, Artificial Sequence
  human ApoB siRNA sequence
taaagacaaggaccaggaggttc

SEQ ID NO: 1873 - DNA, 23 bp, Artificial Sequence
  human ApoB siRNA sequence
aaagacaaggaccaggaggttct

SEQ ID NO: 1874 - DNA, 23 bp, Artificial Sequence
  human ApoB siRNA sequence
aagacaaggaccaggaggttctt

SEQ ID NO: 1875 - DNA, 23 bp, Artificial Sequence
  human ApoB siRNA sequence
agacaaggaccaggaggttcttc

SEQ ID NO: 1876 - DNA, 23 bp, Artificial Sequence
  human ApoB siRNA sequence
gacaaggaccaggaggttcttct

SEQ ID NO: 1877 - DNA, 23 bp, Artificial Sequence
  human ApoB siRNA sequence
acaaggaccaggaggttcttctt

SEQ ID NO: 1878 - DNA, 23 bp, Artificial Sequence
  human ApoB siRNA sequence
caaggaccaggaggttcttcttc

SEQ ID NO: 1879 - DNA, 23 bp, Artificial Sequence
  human ApoB siRNA sequence
aaggaccaggaggttcttcttca

SEQ ID NO: 1880 - DNA, 23 bp, Artificial Sequence
  human ApoB siRNA sequence
aggaccaggaggttcttcttcag

SEQ ID NO: 1881 - DNA, 23 bp, Artificial Sequence
  human ApoB siRNA sequence
ggaccaggaggttcttcttcaga

SEQ ID NO: 1882 - DNA, 23 bp, Artificial Sequence
  human ApoB siRNA sequence
gaccaggaggttcttcttcagac

SEQ ID NO: 1883 - DNA, 23 bp, Artificial Sequence
  human ApoB siRNA sequence
accaggaggttcttcttcagact

SEQ ID NO: 1884 - DNA, 23 bp, Artificial Sequence
  human ApoB siRNA sequence
ccaggaggttcttcttcagactt

SEQ ID NO: 1885 - DNA, 23 bp, Artificial Sequence
  human ApoB siRNA sequence
caggaggttcttcttcagacttt

SEQ ID NO: 1886 - DNA, 23 bp, Artificial Sequence
  human ApoB siRNA sequence
aggaggttcttcttcagactttc

SEQ ID NO: 1887 - DNA, 23 bp, Artificial Sequence
  human ApoB siRNA sequence
ggaggttcttcttcagactttcc

SEQ ID NO: 1888 - DNA, 23 bp, Artificial Sequence
  human ApoB siRNA sequence
gaggttcttcttcagactttcct

SEQ ID NO: 1889 - DNA, 23 bp, Artificial Sequence
  human ApoB siRNA sequence
aggttcttcttcagactttcctt

SEQ ID NO: 1890 - DNA, 23 bp, Artificial Sequence
  human ApoB siRNA sequence
ggttcttcttcagactttccttg

SEQ ID NO: 1891 - DNA, 23 bp, Artificial Sequence
  human ApoB siRNA sequence
gttcttcttcagactttccttga

SEQ ID NO: 1892 - DNA, 23 bp, Artificial Sequence
  human ApoB siRNA sequence
ttcttcttcagactttccttgat

SEQ ID NO: 1893 - DNA, 23 bp, Artificial Sequence
  human ApoB siRNA sequence
tcttcttcagactttccttgatg

SEQ ID NO: 1894 - DNA, 23 bp, Artificial Sequence
  human ApoB siRNA sequence
cttcttcagactttccttgatga

SEQ ID NO: 1895 - DNA, 23 bp, Artificial Sequence
  human ApoB siRNA sequence
ttcttcagactttccttgatgat

SEQ ID NO: 1896 - DNA, 23 bp, Artificial Sequence
  human ApoB siRNA sequence
tcttcagactttccttgatgatg

SEQ ID NO: 1897 - DNA, 23 bp, Artificial Sequence
  human ApoB siRNA sequence
cttcagactttccttgatgatgc

SEQ ID NO: 1898 - DNA, 23 bp, Artificial Sequence
  human ApoB siRNA sequence
ttcagactttccttgatgatgct

SEQ ID NO: 1899 - DNA, 23 bp, Artificial Sequence
  human ApoB siRNA sequence
tcagactttccttgatgatgctt

SEQ ID NO: 1900 - DNA, 23 bp, Artificial Sequence
  human ApoB siRNA sequence
cagactttccttgatgatgcttc

SEQ ID NO: 1901 - DNA, 23 bp, Artificial Sequence
  human ApoB siRNA sequence
agactttccttgatgatgcttct

SEQ ID NO: 1902 - DNA, 23 bp, Artificial Sequence
  human ApoB siRNA sequence
gactttccttgatgatgcttctc

SEQ ID NO: 1903 - DNA, 23 bp, Artificial Sequence
  human ApoB siRNA sequence
actttccttgatgatgcttctcc

SEQ ID NO: 1904 - DNA, 23 bp, Artificial Sequence
  human ApoB siRNA sequence
ctttccttgatgatgcttctccg

SEQ ID NO: 1905 - DNA, 23 bp, Artificial Sequence
  human ApoB siRNA sequence
tttccttgatgatgcttctccgg

SEQ ID NO: 1906 - DNA, 23 bp, Artificial Sequence
  human ApoB siRNA sequence
ttccttgatgatgcttctccggg

SEQ ID NO: 1907 - DNA, 23 bp, Artificial Sequence
  human ApoB siRNA sequence
tccttgatgatgcttctccggga

SEQ ID NO: 1908 - DNA, 23 bp, Artificial Sequence
  human ApoB siRNA sequence
ccttgatgatgcttctccgggag

SEQ ID NO: 1909 - DNA, 23 bp, Artificial Sequence
  human ApoB siRNA sequence
cttgatgatgcttctccgggaga

SEQ ID NO: 1910 - DNA, 23 bp, Artificial Sequence
  human ApoB siRNA sequence
ttgatgatgcttctccgggagat

SEQ ID NO: 1911 - DNA, 23 bp, Artificial Sequence
  human ApoB siRNA sequence
tgatgatgcttctccgggagata

SEQ ID NO: 1912 - DNA, 23 bp, Artificial Sequence
  human ApoB siRNA sequence
gatgatgcttctccgggagataa

SEQ ID NO: 1913 - DNA, 23 bp, Artificial Sequence
  human ApoB siRNA sequence
atgatgcttctccgggagataag

SEQ ID NO: 1914 - DNA, 23 bp, Artificial Sequence
  human ApoB siRNA sequence
tgatgcttctccgggagataagc

SEQ ID NO: 1915 - DNA, 23 bp, Artificial Sequence
  human ApoB siRNA sequence
gatgcttctccgggagataagcg

SEQ ID NO: 1916 - DNA, 23 bp, Artificial Sequence
  human ApoB siRNA sequence
atgcttctccgggagataagcga

SEQ ID NO: 1917 - DNA, 23 bp, Artificial Sequence
  human ApoB siRNA sequence
tgcttctccgggagataagcgac

SEQ ID NO: 1918 - DNA, 23 bp, Artificial Sequence
  human ApoB siRNA sequence
gcttctccgggagataagcgact

SEQ ID NO: 1919 - DNA, 23 bp, Artificial Sequence
  human ApoB siRNA sequence
cttctccgggagataagcgactg

SEQ ID NO: 1920 - DNA, 23 bp, Artificial Sequence
  human ApoB siRNA sequence
ttctccgggagataagcgactgg

SEQ ID NO: 1921 - DNA, 23 bp, Artificial Sequence
  human ApoB siRNA sequence
tctccgggagataagcgactggc

SEQ ID NO: 1922 - DNA, 23 bp, Artificial Sequence
  human ApoB siRNA sequence
ctccgggagataagcgactggct

SEQ ID NO: 1923 - DNA, 23 bp, Artificial Sequence
  human ApoB siRNA sequence
tccgggagataagcgactggctg

SEQ ID NO: 1924 - DNA, 23 bp, Artificial Sequence
  human ApoB siRNA sequence
ccgggagataagcgactggctgc

SEQ ID NO: 1925 - DNA, 23 bp, Artificial Sequence
  human ApoB siRNA sequence
cgggagataagcgactggctgcc

SEQ ID NO: 1926 - DNA, 23 bp, Artificial Sequence
  human ApoB siRNA sequence
gggagataagcgactggctgcct

SEQ ID NO: 1927 - DNA, 23 bp, Artificial Sequence
  human ApoB siRNA sequence
ggagataagcgactggctgccta

SEQ ID NO: 1928 - DNA, 23 bp, Artificial Sequence
  human ApoB siRNA sequence
gagataagcgactggctgcctat

SEQ ID NO: 1929 - DNA, 23 bp, Artificial Sequence
  human ApoB siRNA sequence
agataagcgactggctgcctatc

SEQ ID NO: 1930 - DNA, 23 bp, Artificial Sequence
  human ApoB siRNA sequence
gataagcgactggctgcctatct

SEQ ID NO: 1931 - DNA, 23 bp, Artificial Sequence
  human ApoB siRNA sequence
ataagcgactggctgcctatctt

SEQ ID NO: 1932 - DNA, 23 bp, Artificial Sequence
  human ApoB siRNA sequence
taagcgactggctgcctatctta

SEQ ID NO: 1933 - DNA, 23 bp, Artificial Sequence
  human ApoB siRNA sequence
aagcgactggctgcctatcttat

SEQ ID NO: 1934 - DNA, 23 bp, Artificial Sequence
  human ApoB siRNA sequence
agcgactggctgcctatcttatg

SEQ ID NO: 1935 - DNA, 23 bp, Artificial Sequence
  human ApoB siRNA sequence
gcgactggctgcctatcttatgt

SEQ ID NO: 1936 - DNA, 23 bp, Artificial Sequence
  human ApoB siRNA sequence
cgactggctgcctatcttatgtt

SEQ ID NO: 1937 - DNA, 23 bp, Artificial Sequence
  human ApoB siRNA sequence
gactggctgcctatcttatgttg

SEQ ID NO: 1938 - DNA, 23 bp, Artificial Sequence
  human ApoB siRNA sequence
actggctgcctatcttatgttga

SEQ ID NO: 1939 - DNA, 23 bp, Artificial Sequence
  human ApoB siRNA sequence
ctggctgcctatcttatgttgat

SEQ ID NO: 1940 - DNA, 23 bp, Artificial Sequence
  human ApoB siRNA sequence
tggctgcctatcttatgttgatg

SEQ ID NO: 1941 - DNA, 23 bp, Artificial Sequence
  human ApoB siRNA sequence
ggctgcctatcttatgttgatga

SEQ ID NO: 1942 - DNA, 23 bp, Artificial Sequence
  human ApoB siRNA sequence
gctgcctatcttatgttgatgag

SEQ ID NO: 1943 - DNA, 23 bp, Artificial Sequence
  human ApoB siRNA sequence
ctgcctatcttatgttgatgagg

SEQ ID NO: 1944 - DNA, 23 bp, Artificial Sequence
  human ApoB siRNA sequence
tgcctatcttatgttgatgagga

SEQ ID NO: 1945 - DNA, 23 bp, Artificial Sequence
  human ApoB siRNA sequence
gcctatcttatgttgatgaggag

SEQ ID NO: 1946 - DNA, 23 bp, Artificial Sequence
  human ApoB siRNA sequence
cctatcttatgttgatgaggagt

SEQ ID NO: 1947 - DNA, 23 bp, Artificial Sequence
  human ApoB siRNA sequence
ctatcttatgttgatgaggagtc

SEQ ID NO: 1948 - DNA, 23 bp, Artificial Sequence
  human ApoB siRNA sequence
tatcttatgttgatgaggagtcc

SEQ ID NO: 1949 - DNA, 23 bp, Artificial Sequence
  human ApoB siRNA sequence
atcttatgttgatgaggagtcct

SEQ ID NO: 1950 - DNA, 23 bp, Artificial Sequence
  human ApoB siRNA sequence
tcttatgttgatgaggagtcctt

SEQ ID NO: 1951 - DNA, 23 bp, Artificial Sequence
  human ApoB siRNA sequence
cttatgttgatgaggagtccttc

SEQ ID NO: 1952 - DNA, 23 bp, Artificial Sequence
  human ApoB siRNA sequence
ttatgttgatgaggagtccttca

SEQ ID NO: 1953 - DNA, 23 bp, Artificial Sequence
  human ApoB siRNA sequence
tatgttgatgaggagtccttcac

SEQ ID NO: 1954 - DNA, 23 bp, Artificial Sequence
  human ApoB siRNA sequence
atgttgatgaggagtccttcaca

SEQ ID NO: 1955 - DNA, 23 bp, Artificial Sequence
  human ApoB siRNA sequence
tgttgatgaggagtccttcacag

SEQ ID NO: 1956 - DNA, 23 bp, Artificial Sequence
  human ApoB siRNA sequence
gttgatgaggagtccttcacagg

SEQ ID NO: 1957 - DNA, 23 bp, Artificial Sequence
  human ApoB siRNA sequence
ttgatgaggagtccttcacaggc

SEQ ID NO: 1958 - DNA, 23 bp, Artificial Sequence
  human ApoB siRNA sequence
tgatgaggagtccttcacaggca

SEQ ID NO: 1959 - DNA, 23 bp, Artificial Sequence
  human ApoB siRNA sequence
gatgaggagtccttcacaggcag

SEQ ID NO: 1960 - DNA, 23 bp, Artificial Sequence
  human ApoB siRNA sequence
atgaggagtccttcacaggcaga

SEQ ID NO: 1961 - DNA, 23 bp, Artificial Sequence
  human ApoB siRNA sequence
tgaggagtccttcacaggcagat

SEQ ID NO: 1962 - DNA, 23 bp, Artificial Sequence
  human ApoB siRNA sequence
gaggagtccttcacaggcagata

SEQ ID NO: 1963 - DNA, 23 bp, Artificial Sequence
  human ApoB siRNA sequence
aggagtccttcacaggcagatat

SEQ ID NO: 1964 - DNA, 23 bp, Artificial Sequence
  human ApoB siRNA sequence
ggagtccttcacaggcagatatt

SEQ ID NO: 1965 - DNA, 23 bp, Artificial Sequence
  human ApoB siRNA sequence
gagtccttcacaggcagatatta

SEQ ID NO: 1966 - DNA, 23 bp, Artificial Sequence
  human ApoB siRNA sequence
agtccttcacaggcagatattaa

SEQ ID NO: 1967 - DNA, 23 bp, Artificial Sequence
  human ApoB siRNA sequence
gtccttcacaggcagatattaac

SEQ ID NO: 1968 - DNA, 23 bp, Artificial Sequence
  human ApoB siRNA sequence
tccttcacaggcagatattaaca

SEQ ID NO: 1969 - DNA, 23 bp, Artificial Sequence
  human ApoB siRNA sequence
ccttcacaggcagatattaacaa

SEQ ID NO: 1970 - DNA, 23 bp, Artificial Sequence
  human ApoB siRNA sequence
cttcacaggcagatattaacaaa

SEQ ID NO: 1971 - DNA, 23 bp, Artificial Sequence
  human ApoB siRNA sequence
ttcacaggcagatattaacaaaa

SEQ ID NO: 1972 - DNA, 23 bp, Artificial Sequence
  human ApoB siRNA sequence
tcacaggcagatattaacaaaat

SEQ ID NO: 1973 - DNA, 23 bp, Artificial Sequence
  human ApoB siRNA sequence
cacaggcagatattaacaaaatt

SEQ ID NO: 1974 - DNA, 23 bp, Artificial Sequence
  human ApoB siRNA sequence
acaggcagatattaacaaaattg

SEQ ID NO: 1975 - DNA, 23 bp, Artificial Sequence
  human ApoB siRNA sequence
caggcagatattaacaaaattgt

SEQ ID NO: 1976 - DNA, 23 bp, Artificial Sequence
  human ApoB siRNA sequence
aggcagatattaacaaaattgtc

SEQ ID NO: 1977 - DNA, 23 bp, Artificial Sequence
  human ApoB siRNA sequence
ggcagatattaacaaaattgtcc

SEQ ID NO: 1978 - DNA, 23 bp, Artificial Sequence
  human ApoB siRNA sequence
gcagatattaacaaaattgtcca

SEQ ID NO: 1979 - DNA, 23 bp, Artificial Sequence
  human ApoB siRNA sequence
cagatattaacaaaattgtccaa

SEQ ID NO: 1980 - DNA, 23 bp, Artificial Sequence
  human ApoB siRNA sequence
agatattaacaaaattgtccaaa

SEQ ID NO: 1981 - DNA, 23 bp, Artificial Sequence
  human ApoB siRNA sequence
gatattaacaaaattgtccaaat

SEQ ID NO: 1982 - DNA, 23 bp, Artificial Sequence
  human ApoB siRNA sequence
atattaacaaaattgtccaaatt

SEQ ID NO: 1983 - DNA, 23 bp, Artificial Sequence
  human ApoB siRNA sequence
tattaacaaaattgtccaaattc

SEQ ID NO: 1984 - DNA, 23 bp, Artificial Sequence
  human ApoB siRNA sequence
attaacaaaattgtccaaattct

SEQ ID NO: 1985 - DNA, 23 bp, Artificial Sequence
  human ApoB siRNA sequence
ttaacaaaattgtccaaattcta

SEQ ID NO: 1986 - DNA, 23 bp, Artificial Sequence
  human ApoB siRNA sequence
taacaaaattgtccaaattctac

SEQ ID NO: 1987 - DNA, 23 bp, Artificial Sequence
  human ApoB siRNA sequence
aacaaaattgtccaaattctacc

SEQ ID NO: 1988 - DNA, 23 bp, Artificial Sequence
  human ApoB siRNA sequence
acaaaattgtccaaattctacca

SEQ ID NO: 1989 - DNA, 23 bp, Artificial Sequence
  human ApoB siRNA sequence
caaaattgtccaaattctaccat

SEQ ID NO: 1990 - DNA, 23 bp, Artificial Sequence
  human ApoB siRNA sequence
aaaattgtccaaattctaccatg

SEQ ID NO: 1991 - DNA, 23 bp, Artificial Sequence
  human ApoB siRNA sequence
aaattgtccaaattctaccatgg

SEQ ID NO: 1992 - DNA, 23 bp, Artificial Sequence
  human ApoB siRNA sequence
aattgtccaaattctaccatggg

SEQ ID NO: 1993 - DNA, 23 bp, Artificial Sequence
  human ApoB siRNA sequence
attgtccaaattctaccatggga

SEQ ID NO: 1994 - DNA, 23 bp, Artificial Sequence
  human ApoB siRNA sequence
ttgtccaaattctaccatgggaa

SEQ ID NO: 1995 - DNA, 23 bp, Artificial Sequence
  human ApoB siRNA sequence
tgtccaaattctaccatgggaac

SEQ ID NO: 1996 - DNA, 23 bp, Artificial Sequence
  human ApoB siRNA sequence
gtccaaattctaccatgggaaca

SEQ ID NO: 1997 - DNA, 23 bp, Artificial Sequence
  human ApoB siRNA sequence
tccaaattctaccatgggaacag

SEQ ID NO: 1998 - DNA, 23 bp, Artificial Sequence
  human ApoB siRNA sequence
ccaaattctaccatgggaacaga

SEQ ID NO: 1999 - DNA, 23 bp, Artificial Sequence
  human ApoB siRNA sequence
caaattctaccatgggaacagaa

SEQ ID NO: 2000 - DNA, 23 bp, Artificial Sequence
  human ApoB siRNA sequence
aaattctaccatgggaacagaat

SEQ ID NO: 2001 - DNA, 23 bp, Artificial Sequence
  human ApoB siRNA sequence
aattctaccatgggaacagaatg

SEQ ID NO: 2002 - DNA, 23 bp, Artificial Sequence
  human ApoB siRNA sequence
attctaccatgggaacagaatga

SEQ ID NO: 2003 - DNA, 23 bp, Artificial Sequence
  human ApoB siRNA sequence
ttctaccatgggaacagaatgag

SEQ ID NO: 2004 - DNA, 23 bp, Artificial Sequence
  human ApoB siRNA sequence
tctaccatgggaacagaatgagc

SEQ ID NO: 2005 - DNA, 23 bp, Artificial Sequence
  human ApoB siRNA sequence
ctaccatgggaacagaatgagca

SEQ ID NO: 2006 - DNA, 23 bp, Artificial Sequence
  human ApoB siRNA sequence
taccatgggaacagaatgagcaa

SEQ ID NO: 2007 - DNA, 23 bp, Artificial Sequence
  human ApoB siRNA sequence
accatgggaacagaatgagcaag

SEQ ID NO: 2008 - DNA, 23 bp, Artificial Sequence
  human ApoB siRNA sequence
ccatgggaacagaatgagcaagt

SEQ ID NO: 2009 - DNA, 23 bp, Artificial Sequence
  human ApoB siRNA sequence
catgggaacagaatgagcaagtg

SEQ ID NO: 2010 - DNA, 23 bp, Artificial Sequence
  human ApoB siRNA sequence
atgggaacagaatgagcaagtga

SEQ ID NO: 2011 - DNA, 23 bp, Artificial Sequence
  human ApoB siRNA sequence
tgggaacagaatgagcaagtgaa

SEQ ID NO: 2012 - DNA, 23 bp, Artificial Sequence
  human ApoB siRNA sequence
gggaacagaatgagcaagtgaag

SEQ ID NO: 2013 - DNA, 23 bp, Artificial Sequence
  human ApoB siRNA sequence
ggaacagaatgagcaagtgaaga

SEQ ID NO: 2014 - DNA, 23 bp, Artificial Sequence
  human ApoB siRNA sequence
gaacagaatgagcaagtgaagaa

SEQ ID NO: 2015 - DNA, 23 bp, Artificial Sequence
  human ApoB siRNA sequence
aacagaatgagcaagtgaagaac

SEQ ID NO: 2016 - DNA, 23 bp, Artificial Sequence
  human ApoB siRNA sequence
acagaatgagcaagtgaagaact

SEQ ID NO: 2017 - DNA, 23 bp, Artificial Sequence
  human ApoB siRNA sequence
cagaatgagcaagtgaagaactt

SEQ ID NO: 2018 - DNA, 23 bp, Artificial Sequence
  human ApoB siRNA sequence
agaatgagcaagtgaagaacttt

SEQ ID NO: 2019 - DNA, 23 bp, Artificial Sequence
  human ApoB siRNA sequence
gaatgagcaagtgaagaactttg

SEQ ID NO: 2020 - DNA, 23 bp, Artificial Sequence
  human ApoB siRNA sequence
aatgagcaagtgaagaactttgt

SEQ ID NO: 2021 - DNA, 23 bp, Artificial Sequence
  human ApoB siRNA sequence
atgagcaagtgaagaactttgtg

SEQ ID NO: 2022 - DNA, 23 bp, Artificial Sequence
  human ApoB siRNA sequence
tgagcaagtgaagaactttgtgg

SEQ ID NO: 2023 - DNA, 23 bp, Artificial Sequence
  human ApoB siRNA sequence
gagcaagtgaagaactttgtggc

SEQ ID NO: 2024 - DNA, 23 bp, Artificial Sequence
  human ApoB siRNA sequence
agcaagtgaagaactttgtggct

SEQ ID NO: 2025 - DNA, 23 bp, Artificial Sequence
  human ApoB siRNA sequence
gcaagtgaagaactttgtggctt

SEQ ID NO: 2026 - DNA, 23 bp, Artificial Sequence
  human ApoB siRNA sequence
caagtgaagaactttgtggcttc

SEQ ID NO: 2027 - DNA, 23 bp, Artificial Sequence
  human ApoB siRNA sequence
aagtgaagaactttgtggcttcc

SEQ ID NO: 2028 - DNA, 23 bp, Artificial Sequence
  human ApoB siRNA sequence
agtgaagaactttgtggcttccc

SEQ ID NO: 2029 - DNA, 23 bp, Artificial Sequence
  human ApoB siRNA sequence
gtgaagaactttgtggcttccca

SEQ ID NO: 2030 - DNA, 23 bp, Artificial Sequence
  human ApoB siRNA sequence
tgaagaactttgtggcttcccat

SEQ ID NO: 2031 - DNA, 23 bp, Artificial Sequence
  human ApoB siRNA sequence
gaagaactttgtggcttcccata

SEQ ID NO: 2032 - DNA, 23 bp, Artificial Sequence
  human ApoB siRNA sequence
aagaactttgtggcttcccatat

SEQ ID NO: 2033 - DNA, 23 bp, Artificial Sequence
  human ApoB siRNA sequence
agaactttgtggcttcccatatt

SEQ ID NO: 2034 - DNA, 23 bp, Artificial Sequence
  human ApoB siRNA sequence
gaactttgtggcttcccatattg

SEQ ID NO: 2035 - DNA, 23 bp, Artificial Sequence
  human ApoB siRNA sequence
aactttgtggcttcccatattgc

SEQ ID NO: 2036 - DNA, 23 bp, Artificial Sequence
  human ApoB siRNA sequence
actttgtggcttcccatattgcc

SEQ ID NO: 2037 - DNA, 23 bp, Artificial Sequence
  human ApoB siRNA sequence
ctttgtggcttcccatattgcca

SEQ ID NO: 2038 - DNA, 23 bp, Artificial Sequence
  human ApoB siRNA sequence
tttgtggcttcccatattgccaa

SEQ ID NO: 2039 - DNA, 23 bp, Artificial Sequence
  human ApoB siRNA sequence
ttgtggcttcccatattgccaat

SEQ ID NO: 2040 - DNA, 23 bp, Artificial Sequence
  human ApoB siRNA sequence
tgtggcttcccatattgccaata

SEQ ID NO: 2041 - DNA, 23 bp, Artificial Sequence
  human ApoB siRNA sequence
gtggcttcccatattgccaatat

SEQ ID NO: 2042 - DNA, 23 bp, Artificial Sequence
  human ApoB siRNA sequence
tggcttcccatattgccaatatc

SEQ ID NO: 2043 - DNA, 23 bp, Artificial Sequence
  human ApoB siRNA sequence
ggcttcccatattgccaatatct

SEQ ID NO: 2044 - DNA, 23 bp, Artificial Sequence
  human ApoB siRNA sequence
gcttcccatattgccaatatctt

SEQ ID NO: 2045 - DNA, 23 bp, Artificial Sequence
  human ApoB siRNA sequence
cttcccatattgccaatatcttg

SEQ ID NO: 2046 - DNA, 23 bp, Artificial Sequence
  human ApoB siRNA sequence
ttcccatattgccaatatcttga

SEQ ID NO: 2047 - DNA, 23 bp, Artificial Sequence
  human ApoB siRNA sequence
tcccatattgccaatatcttgaa

SEQ ID NO: 2048 - DNA, 23 bp, Artificial Sequence
  human ApoB siRNA sequence
cccatattgccaatatcttgaac

SEQ ID NO: 2049 - DNA, 23 bp, Artificial Sequence
  human ApoB siRNA sequence
ccatattgccaatatcttgaact

SEQ ID NO: 2050 - DNA, 23 bp, Artificial Sequence
  human ApoB siRNA sequence
catattgccaatatcttgaactc

SEQ ID NO: 2051 - DNA, 23 bp, Artificial Sequence
  human ApoB siRNA sequence
atattgccaatatcttgaactca

SEQ ID NO: 2052 - DNA, 23 bp, Artificial Sequence
  human ApoB siRNA sequence
tattgccaatatcttgaactcag

SEQ ID NO: 2053 - DNA, 23 bp, Artificial Sequence
  human ApoB siRNA sequence
attgccaatatcttgaactcaga

SEQ ID NO: 2054 - DNA, 23 bp, Artificial Sequence
  human ApoB siRNA sequence
ttgccaatatcttgaactcagaa

SEQ ID NO: 2055 - DNA, 23 bp, Artificial Sequence
  human ApoB siRNA sequence
tgccaatatcttgaactcagaag

SEQ ID NO: 2056 - DNA, 23 bp, Artificial Sequence
  human ApoB siRNA sequence
gccaatatcttgaactcagaaga

SEQ ID NO: 2057 - DNA, 23 bp, Artificial Sequence
  human ApoB siRNA sequence
ccaatatcttgaactcagaagaa

SEQ ID NO: 2058 - DNA, 23 bp, Artificial Sequence
  human ApoB siRNA sequence
caatatcttgaactcagaagaat

SEQ ID NO: 2059 - DNA, 23 bp, Artificial Sequence
  human ApoB siRNA sequence
aatatcttgaactcagaagaatt

SEQ ID NO: 2060 - DNA, 23 bp, Artificial Sequence
  human ApoB siRNA sequence
atatcttgaactcagaagaattg

SEQ ID NO: 2061 - DNA, 23 bp, Artificial Sequence
  human ApoB siRNA sequence
tatcttgaactcagaagaattgg

SEQ ID NO: 2062 - DNA, 23 bp, Artificial Sequence
  human ApoB siRNA sequence
atcttgaactcagaagaattgga

SEQ ID NO: 2063 - DNA, 23 bp, Artificial Sequence
  human ApoB siRNA sequence
tcttgaactcagaagaattggat

SEQ ID NO: 2064 - DNA, 23 bp, Artificial Sequence
  human ApoB siRNA sequence
cttgaactcagaagaattggata

SEQ ID NO: 2065 - DNA, 23 bp, Artificial Sequence
  human ApoB siRNA sequence
ttgaactcagaagaattggatat

SEQ ID NO: 2066 - DNA, 23 bp, Artificial Sequence
  human ApoB siRNA sequence
tgaactcagaagaattggatatc

SEQ ID NO: 2067 - DNA, 23 bp, Artificial Sequence
  human ApoB siRNA sequence
gaactcagaagaattggatatcc

SEQ ID NO: 2068 - DNA, 23 bp, Artificial Sequence
  human ApoB siRNA sequence
aactcagaagaattggatatcca

SEQ ID NO: 2069 - DNA, 23 bp, Artificial Sequence
  human ApoB siRNA sequence
actcagaagaattggatatccaa

SEQ ID NO: 2070 - DNA, 23 bp, Artificial Sequence
  human ApoB siRNA sequence
ctcagaagaattggatatccaag

SEQ ID NO: 2071 - DNA, 23 bp, Artificial Sequence
  human ApoB siRNA sequence
tcagaagaattggatatccaaga

SEQ ID NO: 2072 - DNA, 23 bp, Artificial Sequence
  human ApoB siRNA sequence
cagaagaattggatatccaagat

SEQ ID NO: 2073 - DNA, 23 bp, Artificial Sequence
  human ApoB siRNA sequence
agaagaattggatatccaagatc

SEQ ID NO: 2074 - DNA, 23 bp, Artificial Sequence
  human ApoB siRNA sequence
gaagaattggatatccaagatct

SEQ ID NO: 2075 - DNA, 23 bp, Artificial Sequence
  human ApoB siRNA sequence
aagaattggatatccaagatctg

SEQ ID NO: 2076 - DNA, 23 bp, Artificial Sequence
  human ApoB siRNA sequence
agaattggatatccaagatctga

SEQ ID NO: 2077 - DNA, 23 bp, Artificial Sequence
  human ApoB siRNA sequence
gaattggatatccaagatctgaa

SEQ ID NO: 2078 - DNA, 23 bp, Artificial Sequence
  human ApoB siRNA sequence
aattggatatccaagatctgaaa

SEQ ID NO: 2079 - DNA, 23 bp, Artificial Sequence
  human ApoB siRNA sequence
attggatatccaagatctgaaaa

SEQ ID NO: 2080 - DNA, 23 bp, Artificial Sequence
  human ApoB siRNA sequence
ttggatatccaagatctgaaaaa

SEQ ID NO: 2081 - DNA, 23 bp, Artificial Sequence
  human ApoB siRNA sequence
tggatatccaagatctgaaaaag

SEQ ID NO: 2082 - DNA, 23 bp, Artificial Sequence
  human ApoB siRNA sequence
ggatatccaagatctgaaaaagt

SEQ ID NO: 2083 - DNA, 23 bp, Artificial Sequence
  human ApoB siRNA sequence
gatatccaagatctgaaaaagtt

SEQ ID NO: 2084 - DNA, 23 bp, Artificial Sequence
  human ApoB siRNA sequence
atatccaagatctgaaaaagtta

SEQ ID NO: 2085 - DNA, 23 bp, Artificial Sequence
  human ApoB siRNA sequence
tatccaagatctgaaaaagttag

SEQ ID NO: 2086 - DNA, 23 bp, Artificial Sequence
  human ApoB siRNA sequence
atccaagatctgaaaaagttagt

SEQ ID NO: 2087 - DNA, 23 bp, Artificial Sequence
  human ApoB siRNA sequence
tccaagatctgaaaaagttagtg

SEQ ID NO: 2088 - DNA, 23 bp, Artificial Sequence
  human ApoB siRNA sequence
ccaagatctgaaaaagttagtga

SEQ ID NO: 2089 - DNA, 23 bp, Artificial Sequence
  human ApoB siRNA sequence
caagatctgaaaaagttagtgaa

SEQ ID NO: 2090 - DNA, 23 bp, Artificial Sequence
  human ApoB siRNA sequence
aagatctgaaaaagttagtgaaa

SEQ ID NO: 2091 - DNA, 23 bp, Artificial Sequence
  human ApoB siRNA sequence
agatctgaaaaagttagtgaaag

SEQ ID NO: 2092 - DNA, 23 bp, Artificial Sequence
  human ApoB siRNA sequence
gatctgaaaaagttagtgaaaga

SEQ ID NO: 2093 - DNA, 23 bp, Artificial Sequence
  human ApoB siRNA sequence
atctgaaaaagttagtgaaagaa

SEQ ID NO: 2094 - DNA, 23 bp, Artificial Sequence
  human ApoB siRNA sequence
tctgaaaaagttagtgaaagaag

SEQ ID NO: 2095 - DNA, 23 bp, Artificial Sequence
  human ApoB siRNA sequence
ctgaaaaagttagtgaaagaagc

SEQ ID NO: 2096 - DNA, 23 bp, Artificial Sequence
  human ApoB siRNA sequence
tgaaaaagttagtgaaagaagct

SEQ ID NO: 2097 - DNA, 23 bp, Artificial Sequence
  human ApoB siRNA sequence
gaaaaagttagtgaaagaagctc

SEQ ID NO: 2098 - DNA, 23 bp, Artificial Sequence
  human ApoB siRNA sequence
aaaaagttagtgaaagaagctct

SEQ ID NO: 2099 - DNA, 23 bp, Artificial Sequence
  human ApoB siRNA sequence
aaaagttagtgaaagaagctctg

SEQ ID NO: 2100 - DNA, 23 bp, Artificial Sequence
  human ApoB siRNA sequence
aaagttagtgaaagaagctctga

SEQ ID NO: 2101 - DNA, 23 bp, Artificial Sequence
  human ApoB siRNA sequence
aagttagtgaaagaagctctgaa

SEQ ID NO: 2102 - DNA, 23 bp, Artificial Sequence
  human ApoB siRNA sequence
agttagtgaaagaagctctgaaa

SEQ ID NO: 2103 - DNA, 23 bp, Artificial Sequence
  human ApoB siRNA sequence
gttagtgaaagaagctctgaaag

SEQ ID NO: 2104 - DNA, 23 bp, Artificial Sequence
  human ApoB siRNA sequence
ttagtgaaagaagctctgaaaga

SEQ ID NO: 2105 - DNA, 23 bp, Artificial Sequence
  human ApoB siRNA sequence
tagtgaaagaagctctgaaagaa

SEQ ID NO: 2106 - DNA, 23 bp, Artificial Sequence
  human ApoB siRNA sequence
agtgaaagaagctctgaaagaat

SEQ ID NO: 2107 - DNA, 23 bp, Artificial Sequence
  human ApoB siRNA sequence
gtgaaagaagctctgaaagaatc

SEQ ID NO: 2108 - DNA, 23 bp, Artificial Sequence
  human ApoB siRNA sequence
tgaaagaagctctgaaagaatct

SEQ ID NO: 2109 - DNA, 23 bp, Artificial Sequence
  human ApoB siRNA sequence
gaaagaagctctgaaagaatctc

SEQ ID NO: 2110 - DNA, 23 bp, Artificial Sequence
  human ApoB siRNA sequence
aaagaagctctgaaagaatctca

SEQ ID NO: 2111 - DNA, 23 bp, Artificial Sequence
  human ApoB siRNA sequence
aagaagctctgaaagaatctcaa

SEQ ID NO: 2112 - DNA, 23 bp, Artificial Sequence
  human ApoB siRNA sequence
agaagctctgaaagaatctcaac

SEQ ID NO: 2113 - DNA, 23 bp, Artificial Sequence
  human ApoB siRNA sequence
gaagctctgaaagaatctcaact

SEQ ID NO: 2114 - DNA, 23 bp, Artificial Sequence
  human ApoB siRNA sequence
aagctctgaaagaatctcaactt

SEQ ID NO: 2115 - DNA, 23 bp, Artificial Sequence
  human ApoB siRNA sequence
agctctgaaagaatctcaacttc

SEQ ID NO: 2116 - DNA, 23 bp, Artificial Sequence
  human ApoB siRNA sequence
gctctgaaagaatctcaacttcc

SEQ ID NO: 2117 - DNA, 23 bp, Artificial Sequence
  human ApoB siRNA sequence
ctctgaaagaatctcaacttcca

SEQ ID NO: 2118 - DNA, 23 bp, Artificial Sequence
  human ApoB siRNA sequence
tctgaaagaatctcaacttccaa

SEQ ID NO: 2119 - DNA, 23 bp, Artificial Sequence
  human ApoB siRNA sequence
ctgaaagaatctcaacttccaac

SEQ ID NO: 2120 - DNA, 23 bp, Artificial Sequence
  human ApoB siRNA sequence
tgaaagaatctcaacttccaact

SEQ ID NO: 2121 - DNA, 23 bp, Artificial Sequence
  human ApoB siRNA sequence
gaaagaatctcaacttccaactg

SEQ ID NO: 2122 - DNA, 23 bp, Artificial Sequence
  human ApoB siRNA sequence
aaagaatctcaacttccaactgt

SEQ ID NO: 2123 - DNA, 23 bp, Artificial Sequence
  human ApoB siRNA sequence
aagaatctcaacttccaactgtc

SEQ ID NO: 2124 - DNA, 23 bp, Artificial Sequence
  human ApoB siRNA sequence
agaatctcaacttccaactgtca

SEQ ID NO: 2125 - DNA, 23 bp, Artificial Sequence
  human ApoB siRNA sequence
gaatctcaacttccaactgtcat

SEQ ID NO: 2126 - DNA, 23 bp, Artificial Sequence
  human ApoB siRNA sequence
aatctcaacttccaactgtcatg

SEQ ID NO: 2127 - DNA, 23 bp, Artificial Sequence
  human ApoB siRNA sequence
atctcaacttccaactgtcatgg

SEQ ID NO: 2128 - DNA, 23 bp, Artificial Sequence
  human ApoB siRNA sequence
tctcaacttccaactgtcatgga

SEQ ID NO: 2129 - DNA, 23 bp, Artificial Sequence
  human ApoB siRNA sequence
ctcaacttccaactgtcatggac

SEQ ID NO: 2130 - DNA, 23 bp, Artificial Sequence
  human ApoB siRNA sequence
tcaacttccaactgtcatggact

SEQ ID NO: 2131 - DNA, 23 bp, Artificial Sequence
  human ApoB siRNA sequence
caacttccaactgtcatggactt

SEQ ID NO: 2132 - DNA, 23 bp, Artificial Sequence
  human ApoB siRNA sequence
aacttccaactgtcatggacttc

SEQ ID NO: 2133 - DNA, 23 bp, Artificial Sequence
  human ApoB siRNA sequence
acttccaactgtcatggacttca

SEQ ID NO: 2134 - DNA, 23 bp, Artificial Sequence
  human ApoB siRNA sequence
cttccaactgtcatggacttcag

SEQ ID NO: 2135 - DNA, 23 bp, Artificial Sequence
  human ApoB siRNA sequence
ttccaactgtcatggacttcaga

SEQ ID NO: 2136 - DNA, 23 bp, Artificial Sequence
  human ApoB siRNA sequence
tccaactgtcatggacttcagaa

SEQ ID NO: 2137 - DNA, 23 bp, Artificial Sequence
  human ApoB siRNA sequence
ccaactgtcatggacttcagaaa

SEQ ID NO: 2138 - DNA, 23 bp, Artificial Sequence
  human ApoB siRNA sequence
caactgtcatggacttcagaaaa

SEQ ID NO: 2139 - DNA, 23 bp, Artificial Sequence
  human ApoB siRNA sequence
aactgtcatggacttcagaaaat

SEQ ID NO: 2140 - DNA, 23 bp, Artificial Sequence
  human ApoB siRNA sequence
actgtcatggacttcagaaaatt

SEQ ID NO: 2141 - DNA, 23 bp, Artificial Sequence
  human ApoB siRNA sequence
ctgtcatggacttcagaaaattc

SEQ ID NO: 2142 - DNA, 23 bp, Artificial Sequence
  human ApoB siRNA sequence
tgtcatggacttcagaaaattct

SEQ ID NO: 2143 - DNA, 23 bp, Artificial Sequence
  human ApoB siRNA sequence
gtcatggacttcagaaaattctc

SEQ ID NO: 2144 - DNA, 23 bp, Artificial Sequence
  human ApoB siRNA sequence
tcatggacttcagaaaattctct

SEQ ID NO: 2145 - DNA, 23 bp, Artificial Sequence
  human ApoB siRNA sequence
catggacttcagaaaattctctc

SEQ ID NO: 2146 - DNA, 23 bp, Artificial Sequence
  human ApoB siRNA sequence
atggacttcagaaaattctctcg

SEQ ID NO: 2147 - DNA, 23 bp, Artificial Sequence
  human ApoB siRNA sequence
tggacttcagaaaattctctcgg

SEQ ID NO: 2148 - DNA, 23 bp, Artificial Sequence
  human ApoB siRNA sequence
ggacttcagaaaattctctcgga

SEQ ID NO: 2149 - DNA, 23 bp, Artificial Sequence
  human ApoB siRNA sequence
gacttcagaaaattctctcggaa

SEQ ID NO: 2150 - DNA, 23 bp, Artificial Sequence
  human ApoB siRNA sequence
acttcagaaaattctctcggaac

SEQ ID NO: 2151 - DNA, 23 bp, Artificial Sequence
  human ApoB siRNA sequence
cttcagaaaattctctcggaact

SEQ ID NO: 2152 - DNA, 23 bp, Artificial Sequence
  human ApoB siRNA sequence
ttcagaaaattctctcggaacta

SEQ ID NO: 2153 - DNA, 23 bp, Artificial Sequence
  human ApoB siRNA sequence
tcagaaaattctctcggaactat

SEQ ID NO: 2154 - DNA, 23 bp, Artificial Sequence
  human ApoB siRNA sequence
cagaaaattctctcggaactatc

SEQ ID NO: 2155 - DNA, 23 bp, Artificial Sequence
  human ApoB siRNA sequence
agaaaattctctcggaactatca

SEQ ID NO: 2156 - DNA, 23 bp, Artificial Sequence
  human ApoB siRNA sequence
gaaaattctctcggaactatcaa

SEQ ID NO: 2157 - DNA, 23 bp, Artificial Sequence
  human ApoB siRNA sequence
aaaattctctcggaactatcaac

SEQ ID NO: 2158 - DNA, 23 bp, Artificial Sequence
  human ApoB siRNA sequence
aaattctctcggaactatcaact

SEQ ID NO: 2159 - DNA, 23 bp, Artificial Sequence
  human ApoB siRNA sequence
aattctctcggaactatcaactc

SEQ ID NO: 2160 - DNA, 23 bp, Artificial Sequence
  human ApoB siRNA sequence
attctctcggaactatcaactct

SEQ ID NO: 2161 - DNA, 23 bp, Artificial Sequence
  human ApoB siRNA sequence
ttctctcggaactatcaactcta

SEQ ID NO: 2162 - DNA, 23 bp, Artificial Sequence
  human ApoB siRNA sequence
tctctcggaactatcaactctac

SEQ ID NO: 2163 - DNA, 23 bp, Artificial Sequence
  human ApoB siRNA sequence
ctctcggaactatcaactctaca

SEQ ID NO: 2164 - DNA, 23 bp, Artificial Sequence
  human ApoB siRNA sequence
tctcggaactatcaactctacaa

SEQ ID NO: 2165 - DNA, 23 bp, Artificial Sequence
  human ApoB siRNA sequence
ctcggaactatcaactctacaaa

SEQ ID NO: 2166 - DNA, 23 bp, Artificial Sequence
  human ApoB siRNA sequence
tcggaactatcaactctacaaat

SEQ ID NO: 2167 - DNA, 23 bp, Artificial Sequence
  human ApoB siRNA sequence
cggaactatcaactctacaaatc

SEQ ID NO: 2168 - DNA, 23 bp, Artificial Sequence
  human ApoB siRNA sequence
ggaactatcaactctacaaatct

SEQ ID NO: 2169 - DNA, 23 bp, Artificial Sequence
  human ApoB siRNA sequence
gaactatcaactctacaaatctg

SEQ ID NO: 2170 - DNA, 23 bp, Artificial Sequence
  human ApoB siRNA sequence
aactatcaactctacaaatctgt

SEQ ID NO: 2171 - DNA, 23 bp, Artificial Sequence
  human ApoB siRNA sequence
actatcaactctacaaatctgtt

SEQ ID NO: 2172 - DNA, 23 bp, Artificial Sequence
  human ApoB siRNA sequence
ctatcaactctacaaatctgttt

SEQ ID NO: 2173 - DNA, 23 bp, Artificial Sequence
  human ApoB siRNA sequence
tatcaactctacaaatctgtttc

SEQ ID NO: 2174 - DNA, 23 bp, Artificial Sequence
  human ApoB siRNA sequence
atcaactctacaaatctgtttct

SEQ ID NO: 2175 - DNA, 23 bp, Artificial Sequence
  human ApoB siRNA sequence
tcaactctacaaatctgtttctc

SEQ ID NO: 2176 - DNA, 23 bp, Artificial Sequence
  human ApoB siRNA sequence
caactctacaaatctgtttctct

SEQ ID NO: 2177 - DNA, 23 bp, Artificial Sequence
  human ApoB siRNA sequence
aactctacaaatctgtttctctt

SEQ ID NO: 2178 - DNA, 23 bp, Artificial Sequence
  human ApoB siRNA sequence
actctacaaatctgtttctcttc

SEQ ID NO: 2179 - DNA, 23 bp, Artificial Sequence
  human ApoB siRNA sequence
ctctacaaatctgtttctcttcc

SEQ ID NO: 2180 - DNA, 23 bp, Artificial Sequence
  human ApoB siRNA sequence
tctacaaatctgtttctcttcca

SEQ ID NO: 2181 - DNA, 23 bp, Artificial Sequence
  human ApoB siRNA sequence
ctacaaatctgtttctcttccat

SEQ ID NO: 2182 - DNA, 23 bp, Artificial Sequence
  human ApoB siRNA sequence
tacaaatctgtttctcttccatc

SEQ ID NO: 2183 - DNA, 23 bp, Artificial Sequence
  human ApoB siRNA sequence
acaaatctgtttctcttccatca

SEQ ID NO: 2184 - DNA, 23 bp, Artificial Sequence
  human ApoB siRNA sequence
caaatctgtttctcttccatcac

SEQ ID NO: 2185 - DNA, 23 bp, Artificial Sequence
  human ApoB siRNA sequence
aaatctgtttctcttccatcact

SEQ ID NO: 2186 - DNA, 23 bp, Artificial Sequence
  human ApoB siRNA sequence
aatctgtttctcttccatcactt

SEQ ID NO: 2187 - DNA, 23 bp, Artificial Sequence
  human ApoB siRNA sequence
atctgtttctcttccatcacttg

SEQ ID NO: 2188 - DNA, 23 bp, Artificial Sequence
  human ApoB siRNA sequence
tctgtttctcttccatcacttga

SEQ ID NO: 2189 - DNA, 23 bp, Artificial Sequence
  human ApoB siRNA sequence
ctgtttctcttccatcacttgac

SEQ ID NO: 2190 - DNA, 23 bp, Artificial Sequence
  human ApoB siRNA sequence
tgtttctcttccatcacttgacc

SEQ ID NO: 2191 - DNA, 23 bp, Artificial Sequence
  human ApoB siRNA sequence
gtttctcttccatcacttgaccc

SEQ ID NO: 2192 - DNA, 23 bp, Artificial Sequence
  human ApoB siRNA sequence
tttctcttccatcacttgaccca

SEQ ID NO: 2193 - DNA, 23 bp, Artificial Sequence
  human ApoB siRNA sequence
ttctcttccatcacttgacccag

SEQ ID NO: 2194 - DNA, 23 bp, Artificial Sequence
  human ApoB siRNA sequence
tctcttccatcacttgacccagc

SEQ ID NO: 2195 - DNA, 23 bp, Artificial Sequence
  human ApoB siRNA sequence
ctcttccatcacttgacccagcc

SEQ ID NO: 2196 - DNA, 23 bp, Artificial Sequence
  human ApoB siRNA sequence
tcttccatcacttgacccagcct

SEQ ID NO: 2197 - DNA, 23 bp, Artificial Sequence
  human ApoB siRNA sequence
cttccatcacttgacccagcctc

SEQ ID NO: 2198 - DNA, 23 bp, Artificial Sequence
  human ApoB siRNA sequence
ttccatcacttgacccagcctca

SEQ ID NO: 2199 - DNA, 23 bp, Artificial Sequence
  human ApoB siRNA sequence
tccatcacttgacccagcctcag

SEQ ID NO: 2200 - DNA, 23 bp, Artificial Sequence
  human ApoB siRNA sequence
ccatcacttgacccagcctcagc

SEQ ID NO: 2201 - DNA, 23 bp, Artificial Sequence
  human ApoB siRNA sequence
catcacttgacccagcctcagcc

SEQ ID NO: 2202 - DNA, 23 bp, Artificial Sequence
  human ApoB siRNA sequence
atcacttgacccagcctcagcca

SEQ ID NO: 2203 - DNA, 23 bp, Artificial Sequence
  human ApoB siRNA sequence
tcacttgacccagcctcagccaa

SEQ ID NO: 2204 - DNA, 23 bp, Artificial Sequence
  human ApoB siRNA sequence
cacttgacccagcctcagccaaa

SEQ ID NO: 2205 - DNA, 23 bp, Artificial Sequence
  human ApoB siRNA sequence
acttgacccagcctcagccaaaa

SEQ ID NO: 2206 - DNA, 23 bp, Artificial Sequence
  human ApoB siRNA sequence
cttgacccagcctcagccaaaat

SEQ ID NO: 2207 - DNA, 23 bp, Artificial Sequence
  human ApoB siRNA sequence
ttgacccagcctcagccaaaata

SEQ ID NO: 2208 - DNA, 23 bp, Artificial Sequence
  human ApoB siRNA sequence
tgacccagcctcagccaaaatag

SEQ ID NO: 2209 - DNA, 23 bp, Artificial Sequence
  human ApoB siRNA sequence
gacccagcctcagccaaaataga

SEQ ID NO: 2210 - DNA, 23 bp, Artificial Sequence
  human ApoB siRNA sequence
acccagcctcagccaaaatagaa

SEQ ID NO: 2211 - DNA, 23 bp, Artificial Sequence
  human ApoB siRNA sequence
cccagcctcagccaaaatagaag

SEQ ID NO: 2212 - DNA, 23 bp, Artificial Sequence
  human ApoB siRNA sequence
ccagcctcagccaaaatagaagg

SEQ ID NO: 2213 - DNA, 23 bp, Artificial Sequence
  human ApoB siRNA sequence
cagcctcagccaaaatagaaggg

SEQ ID NO: 2214 - DNA, 23 bp, Artificial Sequence
  human ApoB siRNA sequence
agcctcagccaaaatagaaggga

SEQ ID NO: 2215 - DNA, 23 bp, Artificial Sequence
  human ApoB siRNA sequence
gcctcagccaaaatagaagggaa

SEQ ID NO: 2216 - DNA, 23 bp, Artificial Sequence
  human ApoB siRNA sequence
cctcagccaaaatagaagggaat

SEQ ID NO: 2217 - DNA, 23 bp, Artificial Sequence
  human ApoB siRNA sequence
ctcagccaaaatagaagggaatc

SEQ ID NO: 2218 - DNA, 23 bp, Artificial Sequence
  human ApoB siRNA sequence
tcagccaaaatagaagggaatct

SEQ ID NO: 2219 - DNA, 23 bp, Artificial Sequence
  human ApoB siRNA sequence
cagccaaaatagaagggaatctt

SEQ ID NO: 2220 - DNA, 23 bp, Artificial Sequence
  human ApoB siRNA sequence
agccaaaatagaagggaatctta

SEQ ID NO: 2221 - DNA, 23 bp, Artificial Sequence
  human ApoB siRNA sequence
gccaaaatagaagggaatcttat

SEQ ID NO: 2222 - DNA, 23 bp, Artificial Sequence
  human ApoB siRNA sequence
ccaaaatagaagggaatcttata

SEQ ID NO: 2223 - DNA, 23 bp, Artificial Sequence
  human ApoB siRNA sequence
caaaatagaagggaatcttatat

SEQ ID NO: 2224 - DNA, 23 bp, Artificial Sequence
  human ApoB siRNA sequence
aaaatagaagggaatcttatatt

SEQ ID NO: 2225 - DNA, 23 bp, Artificial Sequence
  human ApoB siRNA sequence
aaatagaagggaatcttatattt

SEQ ID NO: 2226 - DNA, 23 bp, Artificial Sequence
  human ApoB siRNA sequence
aatagaagggaatcttatatttg

SEQ ID NO: 2227 - DNA, 23 bp, Artificial Sequence
  human ApoB siRNA sequence
atagaagggaatcttatatttga

SEQ ID NO: 2228 - DNA, 23 bp, Artificial Sequence
  human ApoB siRNA sequence
tagaagggaatcttatatttgat

SEQ ID NO: 2229 - DNA, 23 bp, Artificial Sequence
  human ApoB siRNA sequence
agaagggaatcttatatttgatc

SEQ ID NO: 2230 - DNA, 23 bp, Artificial Sequence
  human ApoB siRNA sequence
gaagggaatcttatatttgatcc

SEQ ID NO: 2231 - DNA, 23 bp, Artificial Sequence
  human ApoB siRNA sequence
aagggaatcttatatttgatcca

SEQ ID NO: 2232 - DNA, 23 bp, Artificial Sequence
  human ApoB siRNA sequence
agggaatcttatatttgatccaa

SEQ ID NO: 2233 - DNA, 23 bp, Artificial Sequence
  human ApoB siRNA sequence
gggaatcttatatttgatccaaa

SEQ ID NO: 2234 - DNA, 23 bp, Artificial Sequence
  human ApoB siRNA sequence
ggaatcttatatttgatccaaat

SEQ ID NO: 2235 - DNA, 23 bp, Artificial Sequence
  human ApoB siRNA sequence
gaatcttatatttgatccaaata

SEQ ID NO: 2236 - DNA, 23 bp, Artificial Sequence
  human ApoB siRNA sequence
aatcttatatttgatccaaataa

SEQ ID NO: 2237 - DNA, 23 bp, Artificial Sequence
  human ApoB siRNA sequence
atcttatatttgatccaaataac

SEQ ID NO: 2238 - DNA, 23 bp, Artificial Sequence
  human ApoB siRNA sequence
tcttatatttgatccaaataact

SEQ ID NO: 2239 - DNA, 23 bp, Artificial Sequence
  human ApoB siRNA sequence
cttatatttgatccaaataacta

SEQ ID NO: 2240 - DNA, 23 bp, Artificial Sequence
  human ApoB siRNA sequence
ttatatttgatccaaataactac

SEQ ID NO: 2241 - DNA, 23 bp, Artificial Sequence
  human ApoB siRNA sequence
tatatttgatccaaataactacc

SEQ ID NO: 2242 - DNA, 23 bp, Artificial Sequence
  human ApoB siRNA sequence
atatttgatccaaataactacct

SEQ ID NO: 2243 - DNA, 23 bp, Artificial Sequence
  human ApoB siRNA sequence
tatttgatccaaataactacctt

SEQ ID NO: 2244 - DNA, 23 bp, Artificial Sequence
  human ApoB siRNA sequence
atttgatccaaataactaccttc

SEQ ID NO: 2245 - DNA, 23 bp, Artificial Sequence
  human ApoB siRNA sequence
tttgatccaaataactaccttcc

SEQ ID NO: 2246 - DNA, 23 bp, Artificial Sequence
  human ApoB siRNA sequence
ttgatccaaataactaccttcct

SEQ ID NO: 2247 - DNA, 23 bp, Artificial Sequence
  human ApoB siRNA sequence
tgatccaaataactaccttccta

SEQ ID NO: 2248 - DNA, 23 bp, Artificial Sequence
  human ApoB siRNA sequence
gatccaaataactaccttcctaa

SEQ ID NO: 2249 - DNA, 23 bp, Artificial Sequence
  human ApoB siRNA sequence
atccaaataactaccttcctaaa

SEQ ID NO: 2250 - DNA, 23 bp, Artificial Sequence
  human ApoB siRNA sequence
tccaaataactaccttcctaaag

SEQ ID NO: 2251 - DNA, 23 bp, Artificial Sequence
  human ApoB siRNA sequence
ccaaataactaccttcctaaaga

SEQ ID NO: 2252 - DNA, 23 bp, Artificial Sequence
  human ApoB siRNA sequence
caaataactaccttcctaaagaa

SEQ ID NO: 2253 - DNA, 23 bp, Artificial Sequence
  human ApoB siRNA sequence
aaataactaccttcctaaagaaa

SEQ ID NO: 2254 - DNA, 23 bp, Artificial Sequence
  human ApoB siRNA sequence
aataactaccttcctaaagaaag

SEQ ID NO: 2255 - DNA, 23 bp, Artificial Sequence
  human ApoB siRNA sequence
ataactaccttcctaaagaaagc

SEQ ID NO: 2256 - DNA, 23 bp, Artificial Sequence
  human ApoB siRNA sequence
taactaccttcctaaagaaagca

SEQ ID NO: 2257 - DNA, 23 bp, Artificial Sequence
  human ApoB siRNA sequence
aactaccttcctaaagaaagcat

SEQ ID NO: 2258 - DNA, 23 bp, Artificial Sequence
  human ApoB siRNA sequence
actaccttcctaaagaaagcatg

SEQ ID NO: 2259 - DNA, 23 bp, Artificial Sequence
  human ApoB siRNA sequence
ctaccttcctaaagaaagcatgc

SEQ ID NO: 2260 - DNA, 23 bp, Artificial Sequence
  human ApoB siRNA sequence
taccttcctaaagaaagcatgct

SEQ ID NO: 2261 - DNA, 23 bp, Artificial Sequence
  human ApoB siRNA sequence
accttcctaaagaaagcatgctg

SEQ ID NO: 2262 - DNA, 23 bp, Artificial Sequence
  human ApoB siRNA sequence
ccttcctaaagaaagcatgctga

SEQ ID NO: 2263 - DNA, 23 bp, Artificial Sequence
  human ApoB siRNA sequence
cttcctaaagaaagcatgctgaa

SEQ ID NO: 2264 - DNA, 23 bp, Artificial Sequence
  human ApoB siRNA sequence
ttcctaaagaaagcatgctgaaa

SEQ ID NO: 2265 - DNA, 23 bp, Artificial Sequence
  human ApoB siRNA sequence
tcctaaagaaagcatgctgaaaa

SEQ ID NO: 2266 - DNA, 23 bp, Artificial Sequence
  human ApoB siRNA sequence
cctaaagaaagcatgctgaaaac

SEQ ID NO: 2267 - DNA, 23 bp, Artificial Sequence
  human ApoB siRNA sequence
ctaaagaaagcatgctgaaaact

SEQ ID NO: 2268 - DNA, 23 bp, Artificial Sequence
  human ApoB siRNA sequence
taaagaaagcatgctgaaaacta

SEQ ID NO: 2269 - DNA, 23 bp, Artificial Sequence
  human ApoB siRNA sequence
aaagaaagcatgctgaaaactac

SEQ ID NO: 2270 - DNA, 23 bp, Artificial Sequence
  human ApoB siRNA sequence
aagaaagcatgctgaaaactacc

SEQ ID NO: 2271 - DNA, 23 bp, Artificial Sequence
  human ApoB siRNA sequence
agaaagcatgctgaaaactaccc

SEQ ID NO: 2272 - DNA, 23 bp, Artificial Sequence
  human ApoB siRNA sequence
gaaagcatgctgaaaactaccct

SEQ ID NO: 2273 - DNA, 23 bp, Artificial Sequence
  human ApoB siRNA sequence
aaagcatgctgaaaactaccctc

SEQ ID NO: 2274 - DNA, 23 bp, Artificial Sequence
  human ApoB siRNA sequence
aagcatgctgaaaactaccctca

SEQ ID NO: 2275 - DNA, 23 bp, Artificial Sequence
  human ApoB siRNA sequence
agcatgctgaaaactaccctcac

SEQ ID NO: 2276 - DNA, 23 bp, Artificial Sequence
  human ApoB siRNA sequence
gcatgctgaaaactaccctcact

SEQ ID NO: 2277 - DNA, 23 bp, Artificial Sequence
  human ApoB siRNA sequence
catgctgaaaactaccctcactg

SEQ ID NO: 2278 - DNA, 23 bp, Artificial Sequence
  human ApoB siRNA sequence
atgctgaaaactaccctcactgc

SEQ ID NO: 2279 - DNA, 23 bp, Artificial Sequence
  human ApoB siRNA sequence
tgctgaaaactaccctcactgcc

SEQ ID NO: 2280 - DNA, 23 bp, Artificial Sequence
  human ApoB siRNA sequence
gctgaaaactaccctcactgcct

SEQ ID NO: 2281 - DNA, 23 bp, Artificial Sequence
  human ApoB siRNA sequence
ctgaaaactaccctcactgcctt

SEQ ID NO: 2282 - DNA, 23 bp, Artificial Sequence
  human ApoB siRNA sequence
tgaaaactaccctcactgccttt

SEQ ID NO: 2283 - DNA, 23 bp, Artificial Sequence
  human ApoB siRNA sequence
gaaaactaccctcactgcctttg

SEQ ID NO: 2284 - DNA, 23 bp, Artificial Sequence
  human ApoB siRNA sequence
aaaactaccctcactgcctttgg

SEQ ID NO: 2285 - DNA, 23 bp, Artificial Sequence
  human ApoB siRNA sequence
aaactaccctcactgcctttgga

SEQ ID NO: 2286 - DNA, 23 bp, Artificial Sequence
  human ApoB siRNA sequence
aactaccctcactgcctttggat

SEQ ID NO: 2287 - DNA, 23 bp, Artificial Sequence
  human ApoB siRNA sequence
actaccctcactgcctttggatt

SEQ ID NO: 2288 - DNA, 23 bp, Artificial Sequence
  human ApoB siRNA sequence
ctaccctcactgcctttggattt

SEQ ID NO: 2289 - DNA, 23 bp, Artificial Sequence
  human ApoB siRNA sequence
taccctcactgcctttggatttg

SEQ ID NO: 2290 - DNA, 23 bp, Artificial Sequence
  human ApoB siRNA sequence
accctcactgcctttggatttgc

SEQ ID NO: 2291 - DNA, 23 bp, Artificial Sequence
  human ApoB siRNA sequence
ccctcactgcctttggatttgct

SEQ ID NO: 2292 - DNA, 23 bp, Artificial Sequence
  human ApoB siRNA sequence
cctcactgcctttggatttgctt

SEQ ID NO: 2293 - DNA, 23 bp, Artificial Sequence
  human ApoB siRNA sequence
ctcactgcctttggatttgcttc

SEQ ID NO: 2294 - DNA, 23 bp, Artificial Sequence
  human ApoB siRNA sequence
tcactgcctttggatttgcttca

SEQ ID NO: 2295 - DNA, 23 bp, Artificial Sequence
  human ApoB siRNA sequence
cactgcctttggatttgcttcag

SEQ ID NO: 2296 - DNA, 23 bp, Artificial Sequence
  human ApoB siRNA sequence
actgcctttggatttgcttcagc

SEQ ID NO: 2297 - DNA, 23 bp, Artificial Sequence
  human ApoB siRNA sequence
ctgcctttggatttgcttcagct

SEQ ID NO: 2298 - DNA, 23 bp, Artificial Sequence
  human ApoB siRNA sequence
tgcctttggatttgcttcagctg

SEQ ID NO: 2299 - DNA, 23 bp, Artificial Sequence
  human ApoB siRNA sequence
gcctttggatttgcttcagctga

SEQ ID NO: 2300 - DNA, 23 bp, Artificial Sequence
  human ApoB siRNA sequence
cctttggatttgcttcagctgac

SEQ ID NO: 2301 - DNA, 23 bp, Artificial Sequence
  human ApoB siRNA sequence
ctttggatttgcttcagctgacc

SEQ ID NO: 2302 - DNA, 23 bp, Artificial Sequence
  human ApoB siRNA sequence
tttggatttgcttcagctgacct

SEQ ID NO: 2303 - DNA, 23 bp, Artificial Sequence
  human ApoB siRNA sequence
ttggatttgcttcagctgacctc

SEQ ID NO: 2304 - DNA, 23 bp, Artificial Sequence
  human ApoB siRNA sequence
tggatttgcttcagctgacctca

SEQ ID NO: 2305 - DNA, 23 bp, Artificial Sequence
  human ApoB siRNA sequence
ggatttgcttcagctgacctcat

SEQ ID NO: 2306 - DNA, 23 bp, Artificial Sequence
  human ApoB siRNA sequence
gatttgcttcagctgacctcatc

SEQ ID NO: 2307 - DNA, 23 bp, Artificial Sequence
  human ApoB siRNA sequence
atttgcttcagctgacctcatcg

SEQ ID NO: 2308 - DNA, 23 bp, Artificial Sequence
  human ApoB siRNA sequence
tttgcttcagctgacctcatcga

SEQ ID NO: 2309 - DNA, 23 bp, Artificial Sequence
  human ApoB siRNA sequence
ttgcttcagctgacctcatcgag

SEQ ID NO: 2310 - DNA, 23 bp, Artificial Sequence
  human ApoB siRNA sequence
tgcttcagctgacctcatcgaga

SEQ ID NO: 2311 - DNA, 23 bp, Artificial Sequence
  human ApoB siRNA sequence
gcttcagctgacctcatcgagat

SEQ ID NO: 2312 - DNA, 23 bp, Artificial Sequence
  human ApoB siRNA sequence
cttcagctgacctcatcgagatt

SEQ ID NO: 2313 - DNA, 23 bp, Artificial Sequence
  human ApoB siRNA sequence
ttcagctgacctcatcgagattg

SEQ ID NO: 2314 - DNA, 23 bp, Artificial Sequence
  human ApoB siRNA sequence
tcagctgacctcatcgagattgg

SEQ ID NO: 2315 - DNA, 23 bp, Artificial Sequence
  human ApoB siRNA sequence
cagctgacctcatcgagattggc

SEQ ID NO: 2316 - DNA, 23 bp, Artificial Sequence
  human ApoB siRNA sequence
agctgacctcatcgagattggct

SEQ ID NO: 2317 - DNA, 23 bp, Artificial Sequence
  human ApoB siRNA sequence
gctgacctcatcgagattggctt

SEQ ID NO: 2318 - DNA, 23 bp, Artificial Sequence
  human ApoB siRNA sequence
ctgacctcatcgagattggcttg

SEQ ID NO: 2319 - DNA, 23 bp, Artificial Sequence
  human ApoB siRNA sequence
tgacctcatcgagattggcttgg

SEQ ID NO: 2320 - DNA, 23 bp, Artificial Sequence
  human ApoB siRNA sequence
gacctcatcgagattggcttgga

SEQ ID NO: 2321 - DNA, 23 bp, Artificial Sequence
  human ApoB siRNA sequence
acctcatcgagattggcttggaa

SEQ ID NO: 2322 - DNA, 23 bp, Artificial Sequence
  human ApoB siRNA sequence
cctcatcgagattggcttggaag

SEQ ID NO: 2323 - DNA, 23 bp, Artificial Sequence
  human ApoB siRNA sequence
ctcatcgagattggcttggaagg

SEQ ID NO: 2324 - DNA, 23 bp, Artificial Sequence
  human ApoB siRNA sequence
tcatcgagattggcttggaagga

SEQ ID NO: 2325 - DNA, 23 bp, Artificial Sequence
  human ApoB siRNA sequence
catcgagattggcttggaaggaa

SEQ ID NO: 2326 - DNA, 23 bp, Artificial Sequence
  human ApoB siRNA sequence
atcgagattggcttggaaggaaa

SEQ ID NO: 2327 - DNA, 23 bp, Artificial Sequence
  human ApoB siRNA sequence
tcgagattggcttggaaggaaaa

SEQ ID NO: 2328 - DNA, 23 bp, Artificial Sequence
  human ApoB siRNA sequence
cgagattggcttggaaggaaaag

SEQ ID NO: 2329 - DNA, 23 bp, Artificial Sequence
  human ApoB siRNA sequence
gagattggcttggaaggaaaagg

SEQ ID NO: 2330 - DNA, 23 bp, Artificial Sequence
  human ApoB siRNA sequence
agattggcttggaaggaaaaggc

SEQ ID NO: 2331 - DNA, 23 bp, Artificial Sequence
  human ApoB siRNA sequence
gattggcttggaaggaaaaggct

SEQ ID NO: 2332 - DNA, 23 bp, Artificial Sequence
  human ApoB siRNA sequence
attggcttggaaggaaaaggctt

SEQ ID NO: 2333 - DNA, 23 bp, Artificial Sequence
  human ApoB siRNA sequence
ttggcttggaaggaaaaggcttt

SEQ ID NO: 2334 - DNA, 23 bp, Artificial Sequence
  human ApoB siRNA sequence
tggcttggaaggaaaaggctttg

SEQ ID NO: 2335 - DNA, 23 bp, Artificial Sequence
  human ApoB siRNA sequence
ggcttggaaggaaaaggctttga

SEQ ID NO: 2336 - DNA, 23 bp, Artificial Sequence
  human ApoB siRNA sequence
gcttggaaggaaaaggctttgag

SEQ ID NO: 2337 - DNA, 23 bp, Artificial Sequence
  human ApoB siRNA sequence
cttggaaggaaaaggctttgagc

SEQ ID NO: 2338 - DNA, 23 bp, Artificial Sequence
  human ApoB siRNA sequence
ttggaaggaaaaggctttgagcc

SEQ ID NO: 2339 - DNA, 23 bp, Artificial Sequence
  human ApoB siRNA sequence
tggaaggaaaaggctttgagcca

SEQ ID NO: 2340 - DNA, 23 bp, Artificial Sequence
  human ApoB siRNA sequence
ggaaggaaaaggctttgagccaa

SEQ ID NO: 2341 - DNA, 23 bp, Artificial Sequence
  human ApoB siRNA sequence
gaaggaaaaggctttgagccaac

SEQ ID NO: 2342 - DNA, 23 bp, Artificial Sequence
  human ApoB siRNA sequence
aaggaaaaggctttgagccaaca

SEQ ID NO: 2343 - DNA, 23 bp, Artificial Sequence
  human ApoB siRNA sequence
aggaaaaggctttgagccaacat

SEQ ID NO: 2344 - DNA, 23 bp, Artificial Sequence
  human ApoB siRNA sequence
ggaaaaggctttgagccaacatt

SEQ ID NO: 2345 - DNA, 23 bp, Artificial Sequence
  human ApoB siRNA sequence
gaaaaggctttgagccaacattg

SEQ ID NO: 2346 - DNA, 23 bp, Artificial Sequence
  human ApoB siRNA sequence
aaaaggctttgagccaacattgg

SEQ ID NO: 2347 - DNA, 23 bp, Artificial Sequence
  human ApoB siRNA sequence
aaaggctttgagccaacattgga

SEQ ID NO: 2348 - DNA, 23 bp, Artificial Sequence
  human ApoB siRNA sequence
aaggctttgagccaacattggaa

SEQ ID NO: 2349 - DNA, 23 bp, Artificial Sequence
  human ApoB siRNA sequence
aggctttgagccaacattggaag

SEQ ID NO: 2350 - DNA, 23 bp, Artificial Sequence
  human ApoB siRNA sequence
ggctttgagccaacattggaagc

SEQ ID NO: 2351 - DNA, 23 bp, Artificial Sequence
  human ApoB siRNA sequence
gctttgagccaacattggaagct

SEQ ID NO: 2352 - DNA, 23 bp, Artificial Sequence
  human ApoB siRNA sequence
ctttgagccaacattggaagctc

SEQ ID NO: 2353 - DNA, 23 bp, Artificial Sequence
  human ApoB siRNA sequence
tttgagccaacattggaagctct

SEQ ID NO: 2354 - DNA, 23 bp, Artificial Sequence
  human ApoB siRNA sequence
ttgagccaacattggaagctctt

SEQ ID NO: 2355 - DNA, 23 bp, Artificial Sequence
  human ApoB siRNA sequence
tgagccaacattggaagctcttt

SEQ ID NO: 2356 - DNA, 23 bp, Artificial Sequence
  human ApoB siRNA sequence
gagccaacattggaagctctttt

SEQ ID NO: 2357 - DNA, 23 bp, Artificial Sequence
  human ApoB siRNA sequence
agccaacattggaagctcttttt

SEQ ID NO: 2358 - DNA, 23 bp, Artificial Sequence
  human ApoB siRNA sequence
gccaacattggaagctctttttg

SEQ ID NO: 2359 - DNA, 23 bp, Artificial Sequence
  human ApoB siRNA sequence
ccaacattggaagctctttttgg

SEQ ID NO: 2360 - DNA, 23 bp, Artificial Sequence
  human ApoB siRNA sequence
caacattggaagctctttttggg

SEQ ID NO: 2361 - DNA, 23 bp, Artificial Sequence
  human ApoB siRNA sequence
aacattggaagctctttttggga

SEQ ID NO: 2362 - DNA, 23 bp, Artificial Sequence
  human ApoB siRNA sequence
acattggaagctctttttgggaa

SEQ ID NO: 2363 - DNA, 23 bp, Artificial Sequence
  human ApoB siRNA sequence
cattggaagctctttttgggaag

SEQ ID NO: 2364 - DNA, 23 bp, Artificial Sequence
  human ApoB siRNA sequence
attggaagctctttttgggaagc

SEQ ID NO: 2365 - DNA, 23 bp, Artificial Sequence
  human ApoB siRNA sequence
ttggaagctctttttgggaagca

SEQ ID NO: 2366 - DNA, 23 bp, Artificial Sequence
  human ApoB siRNA sequence
tggaagctctttttgggaagcaa

SEQ ID NO: 2367 - DNA, 23 bp, Artificial Sequence
  human ApoB siRNA sequence
ggaagctctttttgggaagcaag

SEQ ID NO: 2368 - DNA, 23 bp, Artificial Sequence
  human ApoB siRNA sequence
gaagctctttttgggaagcaagg

SEQ ID NO: 2369 - DNA, 23 bp, Artificial Sequence
  human ApoB siRNA sequence
aagctctttttgggaagcaagga

SEQ ID NO: 2370 - DNA, 23 bp, Artificial Sequence
  human ApoB siRNA sequence
agctctttttgggaagcaaggat

SEQ ID NO: 2371 - DNA, 23 bp, Artificial Sequence
  human ApoB siRNA sequence
gctctttttgggaagcaaggatt

SEQ ID NO: 2372 - DNA, 23 bp, Artificial Sequence
  human ApoB siRNA sequence
ctctttttgggaagcaaggattt

SEQ ID NO: 2373 - DNA, 23 bp, Artificial Sequence
  human ApoB siRNA sequence
tctttttgggaagcaaggatttt

SEQ ID NO: 2374 - DNA, 23 bp, Artificial Sequence
  human ApoB siRNA sequence
ctttttgggaagcaaggattttt

SEQ ID NO: 2375 - DNA, 23 bp, Artificial Sequence
  human ApoB siRNA sequence
tttttgggaagcaaggatttttc

SEQ ID NO: 2376 - DNA, 23 bp, Artificial Sequence
  human ApoB siRNA sequence
ttttgggaagcaaggatttttcc

SEQ ID NO: 2377 - DNA, 23 bp, Artificial Sequence
  human ApoB siRNA sequence
tttgggaagcaaggatttttccc

SEQ ID NO: 2378 - DNA, 23 bp, Artificial Sequence
  human ApoB siRNA sequence
ttgggaagcaaggatttttccca

SEQ ID NO: 2379 - DNA, 23 bp, Artificial Sequence
  human ApoB siRNA sequence
tgggaagcaaggatttttcccag

SEQ ID NO: 2380 - DNA, 23 bp, Artificial Sequence
  human ApoB siRNA sequence
gggaagcaaggatttttcccaga

SEQ ID NO: 2381 - DNA, 23 bp, Artificial Sequence
  human ApoB siRNA sequence
ggaagcaaggatttttcccagac

SEQ ID NO: 2382 - DNA, 23 bp, Artificial Sequence
  human ApoB siRNA sequence
gaagcaaggatttttcccagaca

SEQ ID NO: 2383 - DNA, 23 bp, Artificial Sequence
  human ApoB siRNA sequence
aagcaaggatttttcccagacag

SEQ ID NO: 2384 - DNA, 23 bp, Artificial Sequence
  human ApoB siRNA sequence
agcaaggatttttcccagacagt

SEQ ID NO: 2385 - DNA, 23 bp, Artificial Sequence
  human ApoB siRNA sequence
gcaaggatttttcccagacagtg

SEQ ID NO: 2386 - DNA, 23 bp, Artificial Sequence
  human ApoB siRNA sequence
caaggatttttcccagacagtgt

SEQ ID NO: 2387 - DNA, 23 bp, Artificial Sequence
  human ApoB siRNA sequence
aaggatttttcccagacagtgtc

SEQ ID NO: 2388 - DNA, 23 bp, Artificial Sequence
  human ApoB siRNA sequence
aggatttttcccagacagtgtca

SEQ ID NO: 2389 - DNA, 23 bp, Artificial Sequence
  human ApoB siRNA sequence
ggatttttcccagacagtgtcaa

SEQ ID NO: 2390 - DNA, 23 bp, Artificial Sequence
  human ApoB siRNA sequence
gatttttcccagacagtgtcaac

SEQ ID NO: 2391 - DNA, 23 bp, Artificial Sequence
  human ApoB siRNA sequence
atttttcccagacagtgtcaaca

SEQ ID NO: 2392 - DNA, 23 bp, Artificial Sequence
  human ApoB siRNA sequence
tttttcccagacagtgtcaacaa

SEQ ID NO: 2393 - DNA, 23 bp, Artificial Sequence
  human ApoB siRNA sequence
ttttcccagacagtgtcaacaaa

SEQ ID NO: 2394 - DNA, 23 bp, Artificial Sequence
  human ApoB siRNA sequence
tttcccagacagtgtcaacaaag

SEQ ID NO: 2395 - DNA, 23 bp, Artificial Sequence
  human ApoB siRNA sequence
ttcccagacagtgtcaacaaagc

SEQ ID NO: 2396 - DNA, 23 bp, Artificial Sequence
  human ApoB siRNA sequence
tcccagacagtgtcaacaaagct

SEQ ID NO: 2397 - DNA, 23 bp, Artificial Sequence
  human ApoB siRNA sequence
cccagacagtgtcaacaaagctt

SEQ ID NO: 2398 - DNA, 23 bp, Artificial Sequence
  human ApoB siRNA sequence
ccagacagtgtcaacaaagcttt

SEQ ID NO: 2399 - DNA, 23 bp, Artificial Sequence
  human ApoB siRNA sequence
cagacagtgtcaacaaagctttg

SEQ ID NO: 2400 - DNA, 23 bp, Artificial Sequence
  human ApoB siRNA sequence
agacagtgtcaacaaagctttgt

SEQ ID NO: 2401 - DNA, 23 bp, Artificial Sequence
  human ApoB siRNA sequence
gacagtgtcaacaaagctttgta

SEQ ID NO: 2402 - DNA, 23 bp, Artificial Sequence
  human ApoB siRNA sequence
acagtgtcaacaaagctttgtac

SEQ ID NO: 2403 - DNA, 23 bp, Artificial Sequence
  human ApoB siRNA sequence
cagtgtcaacaaagctttgtact

SEQ ID NO: 2404 - DNA, 23 bp, Artificial Sequence
  human ApoB siRNA sequence
agtgtcaacaaagctttgtactg

SEQ ID NO: 2405 - DNA, 23 bp, Artificial Sequence
  human ApoB siRNA sequence
gtgtcaacaaagctttgtactgg

SEQ ID NO: 2406 - DNA, 23 bp, Artificial Sequence
  human ApoB siRNA sequence
tgtcaacaaagctttgtactggg

SEQ ID NO: 2407 - DNA, 23 bp, Artificial Sequence
  human ApoB siRNA sequence
gtcaacaaagctttgtactgggt

SEQ ID NO: 2408 - DNA, 23 bp, Artificial Sequence
  human ApoB siRNA sequence
tcaacaaagctttgtactgggtt

SEQ ID NO: 2409 - DNA, 23 bp, Artificial Sequence
  human ApoB siRNA sequence
caacaaagctttgtactgggtta

SEQ ID NO: 2410 - DNA, 23 bp, Artificial Sequence
  human ApoB siRNA sequence
aacaaagctttgtactgggttaa

SEQ ID NO: 2411 - DNA, 23 bp, Artificial Sequence
  human ApoB siRNA sequence
acaaagctttgtactgggttaat

SEQ ID NO: 2412 - DNA, 23 bp, Artificial Sequence
  human ApoB siRNA sequence
caaagctttgtactgggttaatg

SEQ ID NO: 2413 - DNA, 23 bp, Artificial Sequence
  human ApoB siRNA sequence
aaagctttgtactgggttaatgg

SEQ ID NO: 2414 - DNA, 23 bp, Artificial Sequence
  human ApoB siRNA sequence
aagctttgtactgggttaatggt

SEQ ID NO: 2415 - DNA, 23 bp, Artificial Sequence
  human ApoB siRNA sequence
agctttgtactgggttaatggtc

SEQ ID NO: 2416 - DNA, 23 bp, Artificial Sequence
  human ApoB siRNA sequence
gctttgtactgggttaatggtca

SEQ ID NO: 2417 - DNA, 23 bp, Artificial Sequence
  human ApoB siRNA sequence
ctttgtactgggttaatggtcaa

SEQ ID NO: 2418 - DNA, 23 bp, Artificial Sequence
  human ApoB siRNA sequence
tttgtactgggttaatggtcaag

SEQ ID NO: 2419 - DNA, 23 bp, Artificial Sequence
  human ApoB siRNA sequence
ttgtactgggttaatggtcaagt

SEQ ID NO: 2420 - DNA, 23 bp, Artificial Sequence
  human ApoB siRNA sequence
tgtactgggttaatggtcaagtt

SEQ ID NO: 2421 - DNA, 23 bp, Artificial Sequence
  human ApoB siRNA sequence
gtactgggttaatggtcaagttc

SEQ ID NO: 2422 - DNA, 23 bp, Artificial Sequence
  human ApoB siRNA sequence
tactgggttaatggtcaagttcc

SEQ ID NO: 2423 - DNA, 23 bp, Artificial Sequence
  human ApoB siRNA sequence
actgggttaatggtcaagttcct

SEQ ID NO: 2424 - DNA, 23 bp, Artificial Sequence
  human ApoB siRNA sequence
ctgggttaatggtcaagttcctg

SEQ ID NO: 2425 - DNA, 23 bp, Artificial Sequence
  human ApoB siRNA sequence
tgggttaatggtcaagttcctga

SEQ ID NO: 2426 - DNA, 23 bp, Artificial Sequence
  human ApoB siRNA sequence
gggttaatggtcaagttcctgat

SEQ ID NO: 2427 - DNA, 23 bp, Artificial Sequence
  human ApoB siRNA sequence
ggttaatggtcaagttcctgatg

SEQ ID NO: 2428 - DNA, 23 bp, Artificial Sequence
  human ApoB siRNA sequence
gttaatggtcaagttcctgatgg

SEQ ID NO: 2429 - DNA, 23 bp, Artificial Sequence
  human ApoB siRNA sequence
ttaatggtcaagttcctgatggt

SEQ ID NO: 2430 - DNA, 23 bp, Artificial Sequence
  human ApoB siRNA sequence
taatggtcaagttcctgatggtg

SEQ ID NO: 2431 - DNA, 23 bp, Artificial Sequence
  human ApoB siRNA sequence
aatggtcaagttcctgatggtgt

SEQ ID NO: 2432 - DNA, 23 bp, Artificial Sequence
  human ApoB siRNA sequence
atggtcaagttcctgatggtgtc

SEQ ID NO: 2433 - DNA, 23 bp, Artificial Sequence
  human ApoB siRNA sequence
tggtcaagttcctgatggtgtct

SEQ ID NO: 2434 - DNA, 23 bp, Artificial Sequence
  human ApoB siRNA sequence
ggtcaagttcctgatggtgtctc

SEQ ID NO: 2435 - DNA, 23 bp, Artificial Sequence
  human ApoB siRNA sequence
gtcaagttcctgatggtgtctct

SEQ ID NO: 2436 - DNA, 23 bp, Artificial Sequence
  human ApoB siRNA sequence
tcaagttcctgatggtgtctcta

SEQ ID NO: 2437 - DNA, 23 bp, Artificial Sequence
  human ApoB siRNA sequence
caagttcctgatggtgtctctaa

SEQ ID NO: 2438 - DNA, 23 bp, Artificial Sequence
  human ApoB siRNA sequence
aagttcctgatggtgtctctaag

SEQ ID NO: 2439 - DNA, 23 bp, Artificial Sequence
  human ApoB siRNA sequence
agttcctgatggtgtctctaagg

SEQ ID NO: 2440 - DNA, 23 bp, Artificial Sequence
  human ApoB siRNA sequence
gttcctgatggtgtctctaaggt

SEQ ID NO: 2441 - DNA, 23 bp, Artificial Sequence
  human ApoB siRNA sequence
ttcctgatggtgtctctaaggtc

SEQ ID NO: 2442 - DNA, 23 bp, Artificial Sequence
  human ApoB siRNA sequence
tcctgatggtgtctctaaggtct

SEQ ID NO: 2443 - DNA, 23 bp, Artificial Sequence
  human ApoB siRNA sequence
cctgatggtgtctctaaggtctt

SEQ ID NO: 2444 - DNA, 23 bp, Artificial Sequence
  human ApoB siRNA sequence
ctgatggtgtctctaaggtctta

SEQ ID NO: 2445 - DNA, 23 bp, Artificial Sequence
  human ApoB siRNA sequence
tgatggtgtctctaaggtcttag

SEQ ID NO: 2446 - DNA, 23 bp, Artificial Sequence
  human ApoB siRNA sequence
gatggtgtctctaaggtcttagt

SEQ ID NO: 2447 - DNA, 23 bp, Artificial Sequence
  human ApoB siRNA sequence
atggtgtctctaaggtcttagtg

SEQ ID NO: 2448 - DNA, 23 bp, Artificial Sequence
  human ApoB siRNA sequence
tggtgtctctaaggtcttagtgg

SEQ ID NO: 2449 - DNA, 23 bp, Artificial Sequence
  human ApoB siRNA sequence
ggtgtctctaaggtcttagtgga

SEQ ID NO: 2450 - DNA, 23 bp, Artificial Sequence
  human ApoB siRNA sequence
gtgtctctaaggtcttagtggac

SEQ ID NO: 2451 - DNA, 23 bp, Artificial Sequence
  human ApoB siRNA sequence
tgtctctaaggtcttagtggacc

SEQ ID NO: 2452 - DNA, 23 bp, Artificial Sequence
  human ApoB siRNA sequence
gtctctaaggtcttagtggacca

SEQ ID NO: 2453 - DNA, 23 bp, Artificial Sequence
  human ApoB siRNA sequence
tctctaaggtcttagtggaccac

SEQ ID NO: 2454 - DNA, 23 bp, Artificial Sequence
  human ApoB siRNA sequence
ctctaaggtcttagtggaccact

SEQ ID NO: 2455 - DNA, 23 bp, Artificial Sequence
  human ApoB siRNA sequence
tctaaggtcttagtggaccactt

SEQ ID NO: 2456 - DNA, 23 bp, Artificial Sequence
  human ApoB siRNA sequence
ctaaggtcttagtggaccacttt

SEQ ID NO: 2457 - DNA, 23 bp, Artificial Sequence
  human ApoB siRNA sequence
taaggtcttagtggaccactttg

SEQ ID NO: 2458 - DNA, 23 bp, Artificial Sequence
  human ApoB siRNA sequence
aaggtcttagtggaccactttgg

SEQ ID NO: 2459 - DNA, 23 bp, Artificial Sequence
  human ApoB siRNA sequence
aggtcttagtggaccactttggc

SEQ ID NO: 2460 - DNA, 23 bp, Artificial Sequence
  human ApoB siRNA sequence
ggtcttagtggaccactttggct

SEQ ID NO: 2461 - DNA, 23 bp, Artificial Sequence
  human ApoB siRNA sequence
gtcttagtggaccactttggcta

SEQ ID NO: 2462 - DNA, 23 bp, Artificial Sequence
  human ApoB siRNA sequence
tcttagtggaccactttggctat

SEQ ID NO: 2463 - DNA, 23 bp, Artificial Sequence
  human ApoB siRNA sequence
cttagtggaccactttggctata

SEQ ID NO: 2464 - DNA, 23 bp, Artificial Sequence
  human ApoB siRNA sequence
ttagtggaccactttggctatac

SEQ ID NO: 2465 - DNA, 23 bp, Artificial Sequence
  human ApoB siRNA sequence
tagtggaccactttggctatacc

SEQ ID NO: 2466 - DNA, 23 bp, Artificial Sequence
  human ApoB siRNA sequence
agtggaccactttggctatacca

SEQ ID NO: 2467 - DNA, 23 bp, Artificial Sequence
  human ApoB siRNA sequence
gtggaccactttggctataccaa

SEQ ID NO: 2468 - DNA, 23 bp, Artificial Sequence
  human ApoB siRNA sequence
tggaccactttggctataccaaa

SEQ ID NO: 2469 - DNA, 23 bp, Artificial Sequence
  human ApoB siRNA sequence
ggaccactttggctataccaaag

SEQ ID NO: 2470 - DNA, 23 bp, Artificial Sequence
  human ApoB siRNA sequence
gaccactttggctataccaaaga

SEQ ID NO: 2471 - DNA, 23 bp, Artificial Sequence
  human ApoB siRNA sequence
accactttggctataccaaagat

SEQ ID NO: 2472 - DNA, 23 bp, Artificial Sequence
  human ApoB siRNA sequence
ccactttggctataccaaagatg

SEQ ID NO: 2473 - DNA, 23 bp, Artificial Sequence
  human ApoB siRNA sequence
cactttggctataccaaagatga

SEQ ID NO: 2474 - DNA, 23 bp, Artificial Sequence
  human ApoB siRNA sequence
actttggctataccaaagatgat

SEQ ID NO: 2475 - DNA, 23 bp, Artificial Sequence
  human ApoB siRNA sequence
ctttggctataccaaagatgata

SEQ ID NO: 2476 - DNA, 23 bp, Artificial Sequence
  human ApoB siRNA sequence
tttggctataccaaagatgataa

SEQ ID NO: 2477 - DNA, 23 bp, Artificial Sequence
  human ApoB siRNA sequence
ttggctataccaaagatgataaa

SEQ ID NO: 2478 - DNA, 23 bp, Artificial Sequence
  human ApoB siRNA sequence
tggctataccaaagatgataaac

SEQ ID NO: 2479 - DNA, 23 bp, Artificial Sequence
  human ApoB siRNA sequence
ggctataccaaagatgataaaca

SEQ ID NO: 2480 - DNA, 23 bp, Artificial Sequence
  human ApoB siRNA sequence
gctataccaaagatgataaacat

SEQ ID NO: 2481 - DNA, 23 bp, Artificial Sequence
  human ApoB siRNA sequence
ctataccaaagatgataaacatg

SEQ ID NO: 2482 - DNA, 23 bp, Artificial Sequence
  human ApoB siRNA sequence
tataccaaagatgataaacatga

SEQ ID NO: 2483 - DNA, 23 bp, Artificial Sequence
  human ApoB siRNA sequence
ataccaaagatgataaacatgag

SEQ ID NO: 2484 - DNA, 23 bp, Artificial Sequence
  human ApoB siRNA sequence
taccaaagatgataaacatgagc

SEQ ID NO: 2485 - DNA, 23 bp, Artificial Sequence
  human ApoB siRNA sequence
accaaagatgataaacatgagca

SEQ ID NO: 2486 - DNA, 23 bp, Artificial Sequence
  human ApoB siRNA sequence
ccaaagatgataaacatgagcag

SEQ ID NO: 2487 - DNA, 23 bp, Artificial Sequence
  human ApoB siRNA sequence
caaagatgataaacatgagcagg

SEQ ID NO: 2488 - DNA, 23 bp, Artificial Sequence
  human ApoB siRNA sequence
aaagatgataaacatgagcagga

SEQ ID NO: 2489 - DNA, 23 bp, Artificial Sequence
  human ApoB siRNA sequence
aagatgataaacatgagcaggat

SEQ ID NO: 2490 - DNA, 23 bp, Artificial Sequence
  human ApoB siRNA sequence
agatgataaacatgagcaggata

SEQ ID NO: 2491 - DNA, 23 bp, Artificial Sequence
  human ApoB siRNA sequence
gatgataaacatgagcaggatat

SEQ ID NO: 2492 - DNA, 23 bp, Artificial Sequence
  human ApoB siRNA sequence
atgataaacatgagcaggatatg

SEQ ID NO: 2493 - DNA, 23 bp, Artificial Sequence
  human ApoB siRNA sequence
tgataaacatgagcaggatatgg

SEQ ID NO: 2494 - DNA, 23 bp, Artificial Sequence
  human ApoB siRNA sequence
gataaacatgagcaggatatggt

SEQ ID NO: 2495 - DNA, 23 bp, Artificial Sequence
  human ApoB siRNA sequence
ataaacatgagcaggatatggta

SEQ ID NO: 2496 - DNA, 23 bp, Artificial Sequence
  human ApoB siRNA sequence
taaacatgagcaggatatggtaa

SEQ ID NO: 2497 - DNA, 23 bp, Artificial Sequence
  human ApoB siRNA sequence
aaacatgagcaggatatggtaaa

SEQ ID NO: 2498 - DNA, 23 bp, Artificial Sequence
  human ApoB siRNA sequence
aacatgagcaggatatggtaaat

SEQ ID NO: 2499 - DNA, 23 bp, Artificial Sequence
  human ApoB siRNA sequence
acatgagcaggatatggtaaatg

SEQ ID NO: 2500 - DNA, 23 bp, Artificial Sequence
  human ApoB siRNA sequence
catgagcaggatatggtaaatgg

SEQ ID NO: 2501 - DNA, 23 bp, Artificial Sequence
  human ApoB siRNA sequence
atgagcaggatatggtaaatgga

SEQ ID NO: 2502 - DNA, 23 bp, Artificial Sequence
  human ApoB siRNA sequence
tgagcaggatatggtaaatggaa

SEQ ID NO: 2503 - DNA, 23 bp, Artificial Sequence
  human ApoB siRNA sequence
gagcaggatatggtaaatggaat

SEQ ID NO: 2504 - DNA, 23 bp, Artificial Sequence
  human ApoB siRNA sequence
agcaggatatggtaaatggaata

SEQ ID NO: 2505 - DNA, 23 bp, Artificial Sequence
  human ApoB siRNA sequence
gcaggatatggtaaatggaataa

SEQ ID NO: 2506 - DNA, 23 bp, Artificial Sequence
  human ApoB siRNA sequence
caggatatggtaaatggaataat

SEQ ID NO: 2507 - DNA, 23 bp, Artificial Sequence
  human ApoB siRNA sequence
aggatatggtaaatggaataatg

SEQ ID NO: 2508 - DNA, 23 bp, Artificial Sequence
  human ApoB siRNA sequence
ggatatggtaaatggaataatgc

SEQ ID NO: 2509 - DNA, 23 bp, Artificial Sequence
  human ApoB siRNA sequence
gatatggtaaatggaataatgct

SEQ ID NO: 2510 - DNA, 23 bp, Artificial Sequence
  human ApoB siRNA sequence
atatggtaaatggaataatgctc

SEQ ID NO: 2511 - DNA, 23 bp, Artificial Sequence
  human ApoB siRNA sequence
tatggtaaatggaataatgctca

SEQ ID NO: 2512 - DNA, 23 bp, Artificial Sequence
  human ApoB siRNA sequence
atggtaaatggaataatgctcag

SEQ ID NO: 2513 - DNA, 23 bp, Artificial Sequence
  human ApoB siRNA sequence
tggtaaatggaataatgctcagt

SEQ ID NO: 2514 - DNA, 23 bp, Artificial Sequence
  human ApoB siRNA sequence
ggtaaatggaataatgctcagtg

SEQ ID NO: 2515 - DNA, 23 bp, Artificial Sequence
  human ApoB siRNA sequence
gtaaatggaataatgctcagtgt

SEQ ID NO: 2516 - DNA, 23 bp, Artificial Sequence
  human ApoB siRNA sequence
taaatggaataatgctcagtgtt

SEQ ID NO: 2517 - DNA, 23 bp, Artificial Sequence
  human ApoB siRNA sequence
aaatggaataatgctcagtgttg

SEQ ID NO: 2518 - DNA, 23 bp, Artificial Sequence
  human ApoB siRNA sequence
aatggaataatgctcagtgttga

SEQ ID NO: 2519 - DNA, 23 bp, Artificial Sequence
  human ApoB siRNA sequence
atggaataatgctcagtgttgag

SEQ ID NO: 2520 - DNA, 23 bp, Artificial Sequence
  human ApoB siRNA sequence
tggaataatgctcagtgttgaga

SEQ ID NO: 2521 - DNA, 23 bp, Artificial Sequence
  human ApoB siRNA sequence
ggaataatgctcagtgttgagaa

SEQ ID NO: 2522 - DNA, 23 bp, Artificial Sequence
  human ApoB siRNA sequence
gaataatgctcagtgttgagaag

SEQ ID NO: 2523 - DNA, 23 bp, Artificial Sequence
  human ApoB siRNA sequence
aataatgctcagtgttgagaagc

SEQ ID NO: 2524 - DNA, 23 bp, Artificial Sequence
  human ApoB siRNA sequence
ataatgctcagtgttgagaagct

SEQ ID NO: 2525 - DNA, 23 bp, Artificial Sequence
  human ApoB siRNA sequence
taatgctcagtgttgagaagctg

SEQ ID NO: 2526 - DNA, 23 bp, Artificial Sequence
  human ApoB siRNA sequence
aatgctcagtgttgagaagctga

SEQ ID NO: 2527 - DNA, 23 bp, Artificial Sequence
  human ApoB siRNA sequence
atgctcagtgttgagaagctgat

SEQ ID NO: 2528 - DNA, 23 bp, Artificial Sequence
  human ApoB siRNA sequence
tgctcagtgttgagaagctgatt

SEQ ID NO: 2529 - DNA, 23 bp, Artificial Sequence
  human ApoB siRNA sequence
gctcagtgttgagaagctgatta

SEQ ID NO: 2530 - DNA, 23 bp, Artificial Sequence
  human ApoB siRNA sequence
ctcagtgttgagaagctgattaa

SEQ ID NO: 2531 - DNA, 23 bp, Artificial Sequence
  human ApoB siRNA sequence
tcagtgttgagaagctgattaaa

SEQ ID NO: 2532 - DNA, 23 bp, Artificial Sequence
  human ApoB siRNA sequence
cagtgttgagaagctgattaaag

SEQ ID NO: 2533 - DNA, 23 bp, Artificial Sequence
  human ApoB siRNA sequence
agtgttgagaagctgattaaaga

SEQ ID NO: 2534 - DNA, 23 bp, Artificial Sequence
  human ApoB siRNA sequence
gtgttgagaagctgattaaagat

SEQ ID NO: 2535 - DNA, 23 bp, Artificial Sequence
  human ApoB siRNA sequence
tgttgagaagctgattaaagatt

SEQ ID NO: 2536 - DNA, 23 bp, Artificial Sequence
  human ApoB siRNA sequence
gttgagaagctgattaaagattt

SEQ ID NO: 2537 - DNA, 23 bp, Artificial Sequence
  human ApoB siRNA sequence
ttgagaagctgattaaagatttg

SEQ ID NO: 2538 - DNA, 23 bp, Artificial Sequence
  human ApoB siRNA sequence
tgagaagctgattaaagatttga

SEQ ID NO: 2539 - DNA, 23 bp, Artificial Sequence
  human ApoB siRNA sequence
gagaagctgattaaagatttgaa

SEQ ID NO: 2540 - DNA, 23 bp, Artificial Sequence
  human ApoB siRNA sequence
agaagctgattaaagatttgaaa

SEQ ID NO: 2541 - DNA, 23 bp, Artificial Sequence
  human ApoB siRNA sequence
gaagctgattaaagatttgaaat

SEQ ID NO: 2542 - DNA, 23 bp, Artificial Sequence
  human ApoB siRNA sequence
aagctgattaaagatttgaaatc

SEQ ID NO: 2543 - DNA, 23 bp, Artificial Sequence
  human ApoB siRNA sequence
agctgattaaagatttgaaatcc

SEQ ID NO: 2544 - DNA, 23 bp, Artificial Sequence
  human ApoB siRNA sequence
gctgattaaagatttgaaatcca

SEQ ID NO: 2545 - DNA, 23 bp, Artificial Sequence
  human ApoB siRNA sequence
ctgattaaagatttgaaatccaa

SEQ ID NO: 2546 - DNA, 23 bp, Artificial Sequence
  human ApoB siRNA sequence
tgattaaagatttgaaatccaaa

SEQ ID NO: 2547 - DNA, 23 bp, Artificial Sequence
  human ApoB siRNA sequence
gattaaagatttgaaatccaaag

SEQ ID NO: 2548 - DNA, 23 bp, Artificial Sequence
  human ApoB siRNA sequence
attaaagatttgaaatccaaaga

SEQ ID NO: 2549 - DNA, 23 bp, Artificial Sequence
  human ApoB siRNA sequence
ttaaagatttgaaatccaaagaa

SEQ ID NO: 2550 - DNA, 23 bp, Artificial Sequence
  human ApoB siRNA sequence
taaagatttgaaatccaaagaag

SEQ ID NO: 2551 - DNA, 23 bp, Artificial Sequence
  human ApoB siRNA sequence
aaagatttgaaatccaaagaagt

SEQ ID NO: 2552 - DNA, 23 bp, Artificial Sequence
  human ApoB siRNA sequence
aagatttgaaatccaaagaagtc

SEQ ID NO: 2553 - DNA, 23 bp, Artificial Sequence
  human ApoB siRNA sequence
agatttgaaatccaaagaagtcc

SEQ ID NO: 2554 - DNA, 23 bp, Artificial Sequence
  human ApoB siRNA sequence
gatttgaaatccaaagaagtccc

SEQ ID NO: 2555 - DNA, 23 bp, Artificial Sequence
  human ApoB siRNA sequence
atttgaaatccaaagaagtcccg

SEQ ID NO: 2556 - DNA, 23 bp, Artificial Sequence
  human ApoB siRNA sequence
tttgaaatccaaagaagtcccgg

SEQ ID NO: 2557 - DNA, 23 bp, Artificial Sequence
  human ApoB siRNA sequence
ttgaaatccaaagaagtcccgga

SEQ ID NO: 2558 - DNA, 23 bp, Artificial Sequence
  human ApoB siRNA sequence
tgaaatccaaagaagtcccggaa

SEQ ID NO: 2559 - DNA, 23 bp, Artificial Sequence
  human ApoB siRNA sequence
gaaatccaaagaagtcccggaag

SEQ ID NO: 2560 - DNA, 23 bp, Artificial Sequence
  human ApoB siRNA sequence
aaatccaaagaagtcccggaagc

SEQ ID NO: 2561 - DNA, 23 bp, Artificial Sequence
  human ApoB siRNA sequence
aatccaaagaagtcccggaagcc

SEQ ID NO: 2562 - DNA, 23 bp, Artificial Sequence
  human ApoB siRNA sequence
atccaaagaagtcccggaagcca

SEQ ID NO: 2563 - DNA, 23 bp, Artificial Sequence
  human ApoB siRNA sequence
tccaaagaagtcccggaagccag

SEQ ID NO: 2564 - DNA, 23 bp, Artificial Sequence
  human ApoB siRNA sequence
ccaaagaagtcccggaagccaga

SEQ ID NO: 2565 - DNA, 23 bp, Artificial Sequence
  human ApoB siRNA sequence
caaagaagtcccggaagccagag

SEQ ID NO: 2566 - DNA, 23 bp, Artificial Sequence
  human ApoB siRNA sequence
aaagaagtcccggaagccagagc

SEQ ID NO: 2567 - DNA, 23 bp, Artificial Sequence
  human ApoB siRNA sequence
aagaagtcccggaagccagagcc

SEQ ID NO: 2568 - DNA, 23 bp, Artificial Sequence
  human ApoB siRNA sequence
agaagtcccggaagccagagcct

SEQ ID NO: 2569 - DNA, 23 bp, Artificial Sequence
  human ApoB siRNA sequence
gaagtcccggaagccagagccta

SEQ ID NO: 2570 - DNA, 23 bp, Artificial Sequence
  human ApoB siRNA sequence
aagtcccggaagccagagcctac

SEQ ID NO: 2571 - DNA, 23 bp, Artificial Sequence
  human ApoB siRNA sequence
agtcccggaagccagagcctacc

SEQ ID NO: 2572 - DNA, 23 bp, Artificial Sequence
  human ApoB siRNA sequence
gtcccggaagccagagcctacct

SEQ ID NO: 2573 - DNA, 23 bp, Artificial Sequence
  human ApoB siRNA sequence
tcccggaagccagagcctacctc

SEQ ID NO: 2574 - DNA, 23 bp, Artificial Sequence
  human ApoB siRNA sequence
cccggaagccagagcctacctcc

SEQ ID NO: 2575 - DNA, 23 bp, Artificial Sequence
  human ApoB siRNA sequence
ccggaagccagagcctacctccg

SEQ ID NO: 2576 - DNA, 23 bp, Artificial Sequence
  human ApoB siRNA sequence
cggaagccagagcctacctccgc

SEQ ID NO: 2577 - DNA, 23 bp, Artificial Sequence
  human ApoB siRNA sequence
ggaagccagagcctacctccgca

SEQ ID NO: 2578 - DNA, 23 bp, Artificial Sequence
  human ApoB siRNA sequence
gaagccagagcctacctccgcat

SEQ ID NO: 2579 - DNA, 23 bp, Artificial Sequence
  human ApoB siRNA sequence
aagccagagcctacctccgcatc

SEQ ID NO: 2580 - DNA, 23 bp, Artificial Sequence
  human ApoB siRNA sequence
agccagagcctacctccgcatct

SEQ ID NO: 2581 - DNA, 23 bp, Artificial Sequence
  human ApoB siRNA sequence
gccagagcctacctccgcatctt

SEQ ID NO: 2582 - DNA, 23 bp, Artificial Sequence
  human ApoB siRNA sequence
ccagagcctacctccgcatcttg

SEQ ID NO: 2583 - DNA, 23 bp, Artificial Sequence
  human ApoB siRNA sequence
cagagcctacctccgcatcttgg

SEQ ID NO: 2584 - DNA, 23 bp, Artificial Sequence
  human ApoB siRNA sequence
agagcctacctccgcatcttggg

SEQ ID NO: 2585 - DNA, 23 bp, Artificial Sequence
  human ApoB siRNA sequence
gagcctacctccgcatcttggga

SEQ ID NO: 2586 - DNA, 23 bp, Artificial Sequence
  human ApoB siRNA sequence
agcctacctccgcatcttgggag

SEQ ID NO: 2587 - DNA, 23 bp, Artificial Sequence
  human ApoB siRNA sequence
gcctacctccgcatcttgggaga

SEQ ID NO: 2588 - DNA, 23 bp, Artificial Sequence
  human ApoB siRNA sequence
cctacctccgcatcttgggagag

SEQ ID NO: 2589 - DNA, 23 bp, Artificial Sequence
  human ApoB siRNA sequence
ctacctccgcatcttgggagagg

SEQ ID NO: 2590 - DNA, 23 bp, Artificial Sequence
  human ApoB siRNA sequence
tacctccgcatcttgggagagga

SEQ ID NO: 2591 - DNA, 23 bp, Artificial Sequence
  human ApoB siRNA sequence
acctccgcatcttgggagaggag

SEQ ID NO: 2592 - DNA, 23 bp, Artificial Sequence
  human ApoB siRNA sequence
cctccgcatcttgggagaggagc

SEQ ID NO: 2593 - DNA, 23 bp, Artificial Sequence
  human ApoB siRNA sequence
ctccgcatcttgggagaggagct

SEQ ID NO: 2594 - DNA, 23 bp, Artificial Sequence
  human ApoB siRNA sequence
tccgcatcttgggagaggagctt

SEQ ID NO: 2595 - DNA, 23 bp, Artificial Sequence
  human ApoB siRNA sequence
ccgcatcttgggagaggagcttg

SEQ ID NO: 2596 - DNA, 23 bp, Artificial Sequence
  human ApoB siRNA sequence
cgcatcttgggagaggagcttgg

SEQ ID NO: 2597 - DNA, 23 bp, Artificial Sequence
  human ApoB siRNA sequence
gcatcttgggagaggagcttggt

SEQ ID NO: 2598 - DNA, 23 bp, Artificial Sequence
  human ApoB siRNA sequence
catcttgggagaggagcttggtt

SEQ ID NO: 2599 - DNA, 23 bp, Artificial Sequence
  human ApoB siRNA sequence
atcttgggagaggagcttggttt

SEQ ID NO: 2600 - DNA, 23 bp, Artificial Sequence
  human ApoB siRNA sequence
tcttgggagaggagcttggtttt

SEQ ID NO: 2601 - DNA, 23 bp, Artificial Sequence
  human ApoB siRNA sequence
cttgggagaggagcttggttttg

SEQ ID NO: 2602 - DNA, 23 bp, Artificial Sequence
  human ApoB siRNA sequence
ttgggagaggagcttggttttgc

SEQ ID NO: 2603 - DNA, 23 bp, Artificial Sequence
  human ApoB siRNA sequence
tgggagaggagcttggttttgcc

SEQ ID NO: 2604 - DNA, 23 bp, Artificial Sequence
  human ApoB siRNA sequence
gggagaggagcttggttttgcca

SEQ ID NO: 2605 - DNA, 23 bp, Artificial Sequence
  human ApoB siRNA sequence
ggagaggagcttggttttgccag

SEQ ID NO: 2606 - DNA, 23 bp, Artificial Sequence
  human ApoB siRNA sequence
gagaggagcttggttttgccagt

SEQ ID NO: 2607 - DNA, 23 bp, Artificial Sequence
  human ApoB siRNA sequence
agaggagcttggttttgccagtc

SEQ ID NO: 2608 - DNA, 23 bp, Artificial Sequence
  human ApoB siRNA sequence
gaggagcttggttttgccagtct

SEQ ID NO: 2609 - DNA, 23 bp, Artificial Sequence
  human ApoB siRNA sequence
aggagcttggttttgccagtctc

SEQ ID NO: 2610 - DNA, 23 bp, Artificial Sequence
  human ApoB siRNA sequence
ggagcttggttttgccagtctcc

SEQ ID NO: 2611 - DNA, 23 bp, Artificial Sequence
  human ApoB siRNA sequence
gagcttggttttgccagtctcca

SEQ ID NO: 2612 - DNA, 23 bp, Artificial Sequence
  human ApoB siRNA sequence
agcttggttttgccagtctccat

SEQ ID NO: 2613 - DNA, 23 bp, Artificial Sequence
  human ApoB siRNA sequence
gcttggttttgccagtctccatg

SEQ ID NO: 2614 - DNA, 23 bp, Artificial Sequence
  human ApoB siRNA sequence
cttggttttgccagtctccatga

SEQ ID NO: 2615 - DNA, 23 bp, Artificial Sequence
  human ApoB siRNA sequence
ttggttttgccagtctccatgac

SEQ ID NO: 2616 - DNA, 23 bp, Artificial Sequence
  human ApoB siRNA sequence
tggttttgccagtctccatgacc

SEQ ID NO: 2617 - DNA, 23 bp, Artificial Sequence
  human ApoB siRNA sequence
ggttttgccagtctccatgacct

SEQ ID NO: 2618 - DNA, 23 bp, Artificial Sequence
  human ApoB siRNA sequence
gttttgccagtctccatgacctc

SEQ ID NO: 2619 - DNA, 23 bp, Artificial Sequence
  human ApoB siRNA sequence
ttttgccagtctccatgacctcc

SEQ ID NO: 2620 - DNA, 23 bp, Artificial Sequence
  human ApoB siRNA sequence
tttgccagtctccatgacctcca

SEQ ID NO: 2621 - DNA, 23 bp, Artificial Sequence
  human ApoB siRNA sequence
ttgccagtctccatgacctccag

SEQ ID NO: 2622 - DNA, 23 bp, Artificial Sequence
  human ApoB siRNA sequence
tgccagtctccatgacctccagc

SEQ ID NO: 2623 - DNA, 23 bp, Artificial Sequence
  human ApoB siRNA sequence
gccagtctccatgacctccagct

SEQ ID NO: 2624 - DNA, 23 bp, Artificial Sequence
  human ApoB siRNA sequence
ccagtctccatgacctccagctc

SEQ ID NO: 2625 - DNA, 23 bp, Artificial Sequence
  human ApoB siRNA sequence
cagtctccatgacctccagctcc

SEQ ID NO: 2626 - DNA, 23 bp, Artificial Sequence
  human ApoB siRNA sequence
agtctccatgacctccagctcct

SEQ ID NO: 2627 - DNA, 23 bp, Artificial Sequence
  human ApoB siRNA sequence
gtctccatgacctccagctcctg

SEQ ID NO: 2628 - DNA, 23 bp, Artificial Sequence
  human ApoB siRNA sequence
tctccatgacctccagctcctgg

SEQ ID NO: 2629 - DNA, 23 bp, Artificial Sequence
  human ApoB siRNA sequence
ctccatgacctccagctcctggg

SEQ ID NO: 2630 - DNA, 23 bp, Artificial Sequence
  human ApoB siRNA sequence
tccatgacctccagctcctggga

SEQ ID NO: 2631 - DNA, 23 bp, Artificial Sequence
  human ApoB siRNA sequence
ccatgacctccagctcctgggaa

SEQ ID NO: 2632 - DNA, 23 bp, Artificial Sequence
  human ApoB siRNA sequence
catgacctccagctcctgggaaa

SEQ ID NO: 2633 - DNA, 23 bp, Artificial Sequence
  human ApoB siRNA sequence
atgacctccagctcctgggaaag

SEQ ID NO: 2634 - DNA, 23 bp, Artificial Sequence
  human ApoB siRNA sequence
tgacctccagctcctgggaaagc

SEQ ID NO: 2635 - DNA, 23 bp, Artificial Sequence
  human ApoB siRNA sequence
gacctccagctcctgggaaagct

SEQ ID NO: 2636 - DNA, 23 bp, Artificial Sequence
  human ApoB siRNA sequence
acctccagctcctgggaaagctg

SEQ ID NO: 2637 - DNA, 23 bp, Artificial Sequence
  human ApoB siRNA sequence
cctccagctcctgggaaagctgc

SEQ ID NO: 2638 - DNA, 23 bp, Artificial Sequence
  human ApoB siRNA sequence
ctccagctcctgggaaagctgct

SEQ ID NO: 2639 - DNA, 23 bp, Artificial Sequence
  human ApoB siRNA sequence
tccagctcctgggaaagctgctt

SEQ ID NO: 2640 - DNA, 23 bp, Artificial Sequence
  human ApoB siRNA sequence
ccagctcctgggaaagctgcttc

SEQ ID NO: 2641 - DNA, 23 bp, Artificial Sequence
  human ApoB siRNA sequence
cagctcctgggaaagctgcttct

SEQ ID NO: 2642 - DNA, 23 bp, Artificial Sequence
  human ApoB siRNA sequence
agctcctgggaaagctgcttctg

SEQ ID NO: 2643 - DNA, 23 bp, Artificial Sequence
  human ApoB siRNA sequence
gctcctgggaaagctgcttctga

SEQ ID NO: 2644 - DNA, 23 bp, Artificial Sequence
  human ApoB siRNA sequence
ctcctgggaaagctgcttctgat

SEQ ID NO: 2645 - DNA, 23 bp, Artificial Sequence
  human ApoB siRNA sequence
tcctgggaaagctgcttctgatg

SEQ ID NO: 2646 - DNA, 23 bp, Artificial Sequence
  human ApoB siRNA sequence
cctgggaaagctgcttctgatgg

SEQ ID NO: 2647 - DNA, 23 bp, Artificial Sequence
  human ApoB siRNA sequence
ctgggaaagctgcttctgatggg

SEQ ID NO: 2648 - DNA, 23 bp, Artificial Sequence
  human ApoB siRNA sequence
tgggaaagctgcttctgatgggt

SEQ ID NO: 2649 - DNA, 23 bp, Artificial Sequence
  human ApoB siRNA sequence
gggaaagctgcttctgatgggtg

SEQ ID NO: 2650 - DNA, 23 bp, Artificial Sequence
  human ApoB siRNA sequence
ggaaagctgcttctgatgggtgc

SEQ ID NO: 2651 - DNA, 23 bp, Artificial Sequence
  human ApoB siRNA sequence
gaaagctgcttctgatgggtgcc

SEQ ID NO: 2652 - DNA, 23 bp, Artificial Sequence
  human ApoB siRNA sequence
aaagctgcttctgatgggtgccc

SEQ ID NO: 2653 - DNA, 23 bp, Artificial Sequence
  human ApoB siRNA sequence
aagctgcttctgatgggtgcccg

SEQ ID NO: 2654 - DNA, 23 bp, Artificial Sequence
  human ApoB siRNA sequence
agctgcttctgatgggtgcccgc

SEQ ID NO: 2655 - DNA, 23 bp, Artificial Sequence
  human ApoB siRNA sequence
gctgcttctgatgggtgcccgca

SEQ ID NO: 2656 - DNA, 23 bp, Artificial Sequence
  human ApoB siRNA sequence
ctgcttctgatgggtgcccgcac

SEQ ID NO: 2657 - DNA, 23 bp, Artificial Sequence
  human ApoB siRNA sequence
tgcttctgatgggtgcccgcact

SEQ ID NO: 2658 - DNA, 23 bp, Artificial Sequence
  human ApoB siRNA sequence
gcttctgatgggtgcccgcactc

SEQ ID NO: 2659 - DNA, 23 bp, Artificial Sequence
  human ApoB siRNA sequence
cttctgatgggtgcccgcactct

SEQ ID NO: 2660 - DNA, 23 bp, Artificial Sequence
  human ApoB siRNA sequence
ttctgatgggtgcccgcactctg

SEQ ID NO: 2661 - DNA, 23 bp, Artificial Sequence
  human ApoB siRNA sequence
tctgatgggtgcccgcactctgc

SEQ ID NO: 2662 - DNA, 23 bp, Artificial Sequence
  human ApoB siRNA sequence
ctgatgggtgcccgcactctgca

SEQ ID NO: 2663 - DNA, 23 bp, Artificial Sequence
  human ApoB siRNA sequence
tgatgggtgcccgcactctgcag

SEQ ID NO: 2664 - DNA, 23 bp, Artificial Sequence
  human ApoB siRNA sequence
gatgggtgcccgcactctgcagg

SEQ ID NO: 2665 - DNA, 23 bp, Artificial Sequence
  human ApoB siRNA sequence
atgggtgcccgcactctgcaggg

SEQ ID NO: 2666 - DNA, 23 bp, Artificial Sequence
  human ApoB siRNA sequence
tgggtgcccgcactctgcagggg

SEQ ID NO: 2667 - DNA, 23 bp, Artificial Sequence
  human ApoB siRNA sequence
gggtgcccgcactctgcagggga

SEQ ID NO: 2668 - DNA, 23 bp, Artificial Sequence
  human ApoB siRNA sequence
ggtgcccgcactctgcaggggat

SEQ ID NO: 2669 - DNA, 23 bp, Artificial Sequence
  human ApoB siRNA sequence
gtgcccgcactctgcaggggatc

SEQ ID NO: 2670 - DNA, 23 bp, Artificial Sequence
  human ApoB siRNA sequence
tgcccgcactctgcaggggatcc

SEQ ID NO: 2671 - DNA, 23 bp, Artificial Sequence
  human ApoB siRNA sequence
gcccgcactctgcaggggatccc

SEQ ID NO: 2672 - DNA, 23 bp, Artificial Sequence
  human ApoB siRNA sequence
cccgcactctgcaggggatcccc

SEQ ID NO: 2673 - DNA, 23 bp, Artificial Sequence
  human ApoB siRNA sequence
ccgcactctgcaggggatccccc

SEQ ID NO: 2674 - DNA, 23 bp, Artificial Sequence
  human ApoB siRNA sequence
cgcactctgcaggggatccccca

SEQ ID NO: 2675 - DNA, 23 bp, Artificial Sequence
  human ApoB siRNA sequence
gcactctgcaggggatcccccag

SEQ ID NO: 2676 - DNA, 23 bp, Artificial Sequence
  human ApoB siRNA sequence
cactctgcaggggatcccccaga

SEQ ID NO: 2677 - DNA, 23 bp, Artificial Sequence
  human ApoB siRNA sequence
actctgcaggggatcccccagat

SEQ ID NO: 2678 - DNA, 23 bp, Artificial Sequence
  human ApoB siRNA sequence
ctctgcaggggatcccccagatg

SEQ ID NO: 2679 - DNA, 23 bp, Artificial Sequence
  human ApoB siRNA sequence
tctgcaggggatcccccagatga

SEQ ID NO: 2680 - DNA, 23 bp, Artificial Sequence
  human ApoB siRNA sequence
ctgcaggggatcccccagatgat

SEQ ID NO: 2681 - DNA, 23 bp, Artificial Sequence
  human ApoB siRNA sequence
tgcaggggatcccccagatgatt

SEQ ID NO: 2682 - DNA, 23 bp, Artificial Sequence
  human ApoB siRNA sequence
gcaggggatcccccagatgattg

SEQ ID NO: 2683 - DNA, 23 bp, Artificial Sequence
  human ApoB siRNA sequence
caggggatcccccagatgattgg

SEQ ID NO: 2684 - DNA, 23 bp, Artificial Sequence
  human ApoB siRNA sequence
aggggatcccccagatgattgga

SEQ ID NO: 2685 - DNA, 23 bp, Artificial Sequence
  human ApoB siRNA sequence
ggggatcccccagatgattggag

SEQ ID NO: 2686 - DNA, 23 bp, Artificial Sequence
  human ApoB siRNA sequence
gggatcccccagatgattggaga

SEQ ID NO: 2687 - DNA, 23 bp, Artificial Sequence
  human ApoB siRNA sequence
ggatcccccagatgattggagag

SEQ ID NO: 2688 - DNA, 23 bp, Artificial Sequence
  human ApoB siRNA sequence
gatcccccagatgattggagagg

SEQ ID NO: 2689 - DNA, 23 bp, Artificial Sequence
  human ApoB siRNA sequence
atcccccagatgattggagaggt

SEQ ID NO: 2690 - DNA, 23 bp, Artificial Sequence
  human ApoB siRNA sequence
tcccccagatgattggagaggtc

SEQ ID NO: 2691 - DNA, 23 bp, Artificial Sequence
  human ApoB siRNA sequence
cccccagatgattggagaggtca

SEQ ID NO: 2692 - DNA, 23 bp, Artificial Sequence
  human ApoB siRNA sequence
ccccagatgattggagaggtcat

SEQ ID NO: 2693 - DNA, 23 bp, Artificial Sequence
  human ApoB siRNA sequence
cccagatgattggagaggtcatc

SEQ ID NO: 2694 - DNA, 23 bp, Artificial Sequence
  human ApoB siRNA sequence
ccagatgattggagaggtcatca

SEQ ID NO: 2695 - DNA, 23 bp, Artificial Sequence
  human ApoB siRNA sequence
cagatgattggagaggtcatcag

SEQ ID NO: 2696 - DNA, 23 bp, Artificial Sequence
  human ApoB siRNA sequence
agatgattggagaggtcatcagg

SEQ ID NO: 2697 - DNA, 23 bp, Artificial Sequence
  human ApoB siRNA sequence
gatgattggagaggtcatcagga

SEQ ID NO: 2698 - DNA, 23 bp, Artificial Sequence
  human ApoB siRNA sequence
atgattggagaggtcatcaggaa

SEQ ID NO: 2699 - DNA, 23 bp, Artificial Sequence
  human ApoB siRNA sequence
tgattggagaggtcatcaggaag

SEQ ID NO: 2700 - DNA, 23 bp, Artificial Sequence
  human ApoB siRNA sequence
gattggagaggtcatcaggaagg

SEQ ID NO: 2701 - DNA, 23 bp, Artificial Sequence
  human ApoB siRNA sequence
attggagaggtcatcaggaaggg

SEQ ID NO: 2702 - DNA, 23 bp, Artificial Sequence
  human ApoB siRNA sequence
ttggagaggtcatcaggaagggc

SEQ ID NO: 2703 - DNA, 23 bp, Artificial Sequence
  human ApoB siRNA sequence
tggagaggtcatcaggaagggct

SEQ ID NO: 2704 - DNA, 23 bp, Artificial Sequence
  human ApoB siRNA sequence
ggagaggtcatcaggaagggctc

SEQ ID NO: 2705 - DNA, 23 bp, Artificial Sequence
  human ApoB siRNA sequence
gagaggtcatcaggaagggctca

SEQ ID NO: 2706 - DNA, 23 bp, Artificial Sequence
  human ApoB siRNA sequence
agaggtcatcaggaagggctcaa

SEQ ID NO: 2707 - DNA, 23 bp, Artificial Sequence
  human ApoB siRNA sequence
gaggtcatcaggaagggctcaaa

SEQ ID NO: 2708 - DNA, 23 bp, Artificial Sequence
  human ApoB siRNA sequence
aggtcatcaggaagggctcaaag

SEQ ID NO: 2709 - DNA, 23 bp, Artificial Sequence
  human ApoB siRNA sequence
ggtcatcaggaagggctcaaaga

SEQ ID NO: 2710 - DNA, 23 bp, Artificial Sequence
  human ApoB siRNA sequence
gtcatcaggaagggctcaaagaa

SEQ ID NO: 2711 - DNA, 23 bp, Artificial Sequence
  human ApoB siRNA sequence
tcatcaggaagggctcaaagaat

SEQ ID NO: 2712 - DNA, 23 bp, Artificial Sequence
  human ApoB siRNA sequence
catcaggaagggctcaaagaatg

SEQ ID NO: 2713 - DNA, 23 bp, Artificial Sequence
  human ApoB siRNA sequence
atcaggaagggctcaaagaatga

SEQ ID NO: 2714 - DNA, 23 bp, Artificial Sequence
  human ApoB siRNA sequence
tcaggaagggctcaaagaatgac

SEQ ID NO: 2715 - DNA, 23 bp, Artificial Sequence
  human ApoB siRNA sequence
caggaagggctcaaagaatgact

SEQ ID NO: 2716 - DNA, 23 bp, Artificial Sequence
  human ApoB siRNA sequence
aggaagggctcaaagaatgactt

SEQ ID NO: 2717 - DNA, 23 bp, Artificial Sequence
  human ApoB siRNA sequence
ggaagggctcaaagaatgacttt

SEQ ID NO: 2718 - DNA, 23 bp, Artificial Sequence
  human ApoB siRNA sequence
gaagggctcaaagaatgactttt

SEQ ID NO: 2719 - DNA, 23 bp, Artificial Sequence
  human ApoB siRNA sequence
aagggctcaaagaatgacttttt

SEQ ID NO: 2720 - DNA, 23 bp, Artificial Sequence
  human ApoB siRNA sequence
agggctcaaagaatgactttttt

SEQ ID NO: 2721 - DNA, 23 bp, Artificial Sequence
  human ApoB siRNA sequence
gggctcaaagaatgacttttttc

SEQ ID NO: 2722 - DNA, 23 bp, Artificial Sequence
  human ApoB siRNA sequence
ggctcaaagaatgacttttttct

SEQ ID NO: 2723 - DNA, 23 bp, Artificial Sequence
  human ApoB siRNA sequence
gctcaaagaatgacttttttctt

SEQ ID NO: 2724 - DNA, 23 bp, Artificial Sequence
  human ApoB siRNA sequence
ctcaaagaatgacttttttcttc

SEQ ID NO: 2725 - DNA, 23 bp, Artificial Sequence
  human ApoB siRNA sequence
tcaaagaatgacttttttcttca

SEQ ID NO: 2726 - DNA, 23 bp, Artificial Sequence
  human ApoB siRNA sequence
caaagaatgacttttttcttcac

SEQ ID NO: 2727 - DNA, 23 bp, Artificial Sequence
  human ApoB siRNA sequence
aaagaatgacttttttcttcact

SEQ ID NO: 2728 - DNA, 23 bp, Artificial Sequence
  human ApoB siRNA sequence
aagaatgacttttttcttcacta

SEQ ID NO: 2729 - DNA, 23 bp, Artificial Sequence
  human ApoB siRNA sequence
agaatgacttttttcttcactac

SEQ ID NO: 2730 - DNA, 23 bp, Artificial Sequence
  human ApoB siRNA sequence
gaatgacttttttcttcactaca

SEQ ID NO: 2731 - DNA, 23 bp, Artificial Sequence
  human ApoB siRNA sequence
aatgacttttttcttcactacat

SEQ ID NO: 2732 - DNA, 23 bp, Artificial Sequence
  human ApoB siRNA sequence
atgacttttttcttcactacatc

SEQ ID NO: 2733 - DNA, 23 bp, Artificial Sequence
  human ApoB siRNA sequence
tgacttttttcttcactacatct

SEQ ID NO: 2734 - DNA, 23 bp, Artificial Sequence
  human ApoB siRNA sequence
gacttttttcttcactacatctt

SEQ ID NO: 2735 - DNA, 23 bp, Artificial Sequence
  human ApoB siRNA sequence
acttttttcttcactacatcttc

SEQ ID NO: 2736 - DNA, 23 bp, Artificial Sequence
  human ApoB siRNA sequence
cttttttcttcactacatcttca

SEQ ID NO: 2737 - DNA, 23 bp, Artificial Sequence
  human ApoB siRNA sequence
ttttttcttcactacatcttcat

SEQ ID NO: 2738 - DNA, 23 bp, Artificial Sequence
  human ApoB siRNA sequence
tttttcttcactacatcttcatg

SEQ ID NO: 2739 - DNA, 23 bp, Artificial Sequence
  human ApoB siRNA sequence
ttttcttcactacatcttcatgg

SEQ ID NO: 2740 - DNA, 23 bp, Artificial Sequence
  human ApoB siRNA sequence
tttcttcactacatcttcatgga

SEQ ID NO: 2741 - DNA, 23 bp, Artificial Sequence
  human ApoB siRNA sequence
ttcttcactacatcttcatggag

SEQ ID NO: 2742 - DNA, 23 bp, Artificial Sequence
  human ApoB siRNA sequence
tcttcactacatcttcatggaga

SEQ ID NO: 2743 - DNA, 23 bp, Artificial Sequence
  human ApoB siRNA sequence
cttcactacatcttcatggagaa

SEQ ID NO: 2744 - DNA, 23 bp, Artificial Sequence
  human ApoB siRNA sequence
ttcactacatcttcatggagaat

SEQ ID NO: 2745 - DNA, 23 bp, Artificial Sequence
  human ApoB siRNA sequence
tcactacatcttcatggagaatg

SEQ ID NO: 2746 - DNA, 23 bp, Artificial Sequence
  human ApoB siRNA sequence
cactacatcttcatggagaatgc

SEQ ID NO: 2747 - DNA, 23 bp, Artificial Sequence
  human ApoB siRNA sequence
actacatcttcatggagaatgcc

SEQ ID NO: 2748 - DNA, 23 bp, Artificial Sequence
  human ApoB siRNA sequence
ctacatcttcatggagaatgcct

SEQ ID NO: 2749 - DNA, 23 bp, Artificial Sequence
  human ApoB siRNA sequence
tacatcttcatggagaatgcctt

SEQ ID NO: 2750 - DNA, 23 bp, Artificial Sequence
  human ApoB siRNA sequence
acatcttcatggagaatgccttt

SEQ ID NO: 2751 - DNA, 23 bp, Artificial Sequence
  human ApoB siRNA sequence
catcttcatggagaatgcctttg

SEQ ID NO: 2752 - DNA, 23 bp, Artificial Sequence
  human ApoB siRNA sequence
atcttcatggagaatgcctttga

SEQ ID NO: 2753 - DNA, 23 bp, Artificial Sequence
  human ApoB siRNA sequence
tcttcatggagaatgcctttgaa

SEQ ID NO: 2754 - DNA, 23 bp, Artificial Sequence
  human ApoB siRNA sequence
cttcatggagaatgcctttgaac

SEQ ID NO: 2755 - DNA, 23 bp, Artificial Sequence
  human ApoB siRNA sequence
ttcatggagaatgcctttgaact

SEQ ID NO: 2756 - DNA, 23 bp, Artificial Sequence
  human ApoB siRNA sequence
tcatggagaatgcctttgaactc

SEQ ID NO: 2757 - DNA, 23 bp, Artificial Sequence
  human ApoB siRNA sequence
catggagaatgcctttgaactcc

SEQ ID NO: 2758 - DNA, 23 bp, Artificial Sequence
  human ApoB siRNA sequence
atggagaatgcctttgaactccc

SEQ ID NO: 2759 - DNA, 23 bp, Artificial Sequence
  human ApoB siRNA sequence
tggagaatgcctttgaactcccc

SEQ ID NO: 2760 - DNA, 23 bp, Artificial Sequence
  human ApoB siRNA sequence
ggagaatgcctttgaactcccca

SEQ ID NO: 2761 - DNA, 23 bp, Artificial Sequence
  human ApoB siRNA sequence
gagaatgcctttgaactccccac

SEQ ID NO: 2762 - DNA, 23 bp, Artificial Sequence
  human ApoB siRNA sequence
agaatgcctttgaactccccact

SEQ ID NO: 2763 - DNA, 23 bp, Artificial Sequence
  human ApoB siRNA sequence
gaatgcctttgaactccccactg

SEQ ID NO: 2764 - DNA, 23 bp, Artificial Sequence
  human ApoB siRNA sequence
aatgcctttgaactccccactgg

SEQ ID NO: 2765 - DNA, 23 bp, Artificial Sequence
  human ApoB siRNA sequence
atgcctttgaactccccactgga

SEQ ID NO: 2766 - DNA, 23 bp, Artificial Sequence
  human ApoB siRNA sequence
tgcctttgaactccccactggag

SEQ ID NO: 2767 - DNA, 23 bp, Artificial Sequence
  human ApoB siRNA sequence
gcctttgaactccccactggagc

SEQ ID NO: 2768 - DNA, 23 bp, Artificial Sequence
  human ApoB siRNA sequence
cctttgaactccccactggagct

SEQ ID NO: 2769 - DNA, 23 bp, Artificial Sequence
  human ApoB siRNA sequence
ctttgaactccccactggagctg

SEQ ID NO: 2770 - DNA, 23 bp, Artificial Sequence
  human ApoB siRNA sequence
tttgaactccccactggagctgg

SEQ ID NO: 2771 - DNA, 23 bp, Artificial Sequence
  human ApoB siRNA sequence
ttgaactccccactggagctgga

SEQ ID NO: 2772 - DNA, 23 bp, Artificial Sequence
  human ApoB siRNA sequence
tgaactccccactggagctggat

SEQ ID NO: 2773 - DNA, 23 bp, Artificial Sequence
  human ApoB siRNA sequence
gaactccccactggagctggatt

SEQ ID NO: 2774 - DNA, 23 bp, Artificial Sequence
  human ApoB siRNA sequence
aactccccactggagctggatta

SEQ ID NO: 2775 - DNA, 23 bp, Artificial Sequence
  human ApoB siRNA sequence
actccccactggagctggattac

SEQ ID NO: 2776 - DNA, 23 bp, Artificial Sequence
  human ApoB siRNA sequence
ctccccactggagctggattaca

SEQ ID NO: 2777 - DNA, 23 bp, Artificial Sequence
  human ApoB siRNA sequence
tccccactggagctggattacag

SEQ ID NO: 2778 - DNA, 23 bp, Artificial Sequence
  human ApoB siRNA sequence
ccccactggagctggattacagt

SEQ ID NO: 2779 - DNA, 23 bp, Artificial Sequence
  human ApoB siRNA sequence
cccactggagctggattacagtt

SEQ ID NO: 2780 - DNA, 23 bp, Artificial Sequence
  human ApoB siRNA sequence
ccactggagctggattacagttg

SEQ ID NO: 2781 - DNA, 23 bp, Artificial Sequence
  human ApoB siRNA sequence
cactggagctggattacagttgc

SEQ ID NO: 2782 - DNA, 23 bp, Artificial Sequence
  human ApoB siRNA sequence
actggagctggattacagttgca

SEQ ID NO: 2783 - DNA, 23 bp, Artificial Sequence
  human ApoB siRNA sequence
ctggagctggattacagttgcaa

SEQ ID NO: 2784 - DNA, 23 bp, Artificial Sequence
  human ApoB siRNA sequence
tggagctggattacagttgcaaa

SEQ ID NO: 2785 - DNA, 23 bp, Artificial Sequence
  human ApoB siRNA sequence
ggagctggattacagttgcaaat

SEQ ID NO: 2786 - DNA, 23 bp, Artificial Sequence
  human ApoB siRNA sequence
gagctggattacagttgcaaata

SEQ ID NO: 2787 - DNA, 23 bp, Artificial Sequence
  human ApoB siRNA sequence
agctggattacagttgcaaatat

SEQ ID NO: 2788 - DNA, 23 bp, Artificial Sequence
  human ApoB siRNA sequence
gctggattacagttgcaaatatc

SEQ ID NO: 2789 - DNA, 23 bp, Artificial Sequence
  human ApoB siRNA sequence
ctggattacagttgcaaatatct

SEQ ID NO: 2790 - DNA, 23 bp, Artificial Sequence
  human ApoB siRNA sequence
tggattacagttgcaaatatctt

SEQ ID NO: 2791 - DNA, 23 bp, Artificial Sequence
  human ApoB siRNA sequence
ggattacagttgcaaatatcttc

SEQ ID NO: 2792 - DNA, 23 bp, Artificial Sequence
  human ApoB siRNA sequence
gattacagttgcaaatatcttca

SEQ ID NO: 2793 - DNA, 23 bp, Artificial Sequence
  human ApoB siRNA sequence
attacagttgcaaatatcttcat

SEQ ID NO: 2794 - DNA, 23 bp, Artificial Sequence
  human ApoB siRNA sequence
ttacagttgcaaatatcttcatc

SEQ ID NO: 2795 - DNA, 23 bp, Artificial Sequence
  human ApoB siRNA sequence
tacagttgcaaatatcttcatct

SEQ ID NO: 2796 - DNA, 23 bp, Artificial Sequence
  human ApoB siRNA sequence
acagttgcaaatatcttcatctg

SEQ ID NO: 2797 - DNA, 23 bp, Artificial Sequence
  human ApoB siRNA sequence
cagttgcaaatatcttcatctgg

SEQ ID NO: 2798 - DNA, 23 bp, Artificial Sequence
  human ApoB siRNA sequence
agttgcaaatatcttcatctgga

SEQ ID NO: 2799 - DNA, 23 bp, Artificial Sequence
  human ApoB siRNA sequence
gttgcaaatatcttcatctggag

SEQ ID NO: 2800 - DNA, 23 bp, Artificial Sequence
  human ApoB siRNA sequence
ttgcaaatatcttcatctggagt

SEQ ID NO: 2801 - DNA, 23 bp, Artificial Sequence
  human ApoB siRNA sequence
tgcaaatatcttcatctggagtc

SEQ ID NO: 2802 - DNA, 23 bp, Artificial Sequence
  human ApoB siRNA sequence
gcaaatatcttcatctggagtca

SEQ ID NO: 2803 - DNA, 23 bp, Artificial Sequence
  human ApoB siRNA sequence
caaatatcttcatctggagtcat

SEQ ID NO: 2804 - DNA, 23 bp, Artificial Sequence
  human ApoB siRNA sequence
aaatatcttcatctggagtcatt

SEQ ID NO: 2805 - DNA, 23 bp, Artificial Sequence
  human ApoB siRNA sequence
aatatcttcatctggagtcattg

SEQ ID NO: 2806 - DNA, 23 bp, Artificial Sequence
  human ApoB siRNA sequence
atatcttcatctggagtcattgc

SEQ ID NO: 2807 - DNA, 23 bp, Artificial Sequence
  human ApoB siRNA sequence
tatcttcatctggagtcattgct

SEQ ID NO: 2808 - DNA, 23 bp, Artificial Sequence
  human ApoB siRNA sequence
atcttcatctggagtcattgctc

SEQ ID NO: 2809 - DNA, 23 bp, Artificial Sequence
  human ApoB siRNA sequence
tcttcatctggagtcattgctcc

SEQ ID NO: 2810 - DNA, 23 bp, Artificial Sequence
  human ApoB siRNA sequence
cttcatctggagtcattgctccc

SEQ ID NO: 2811 - DNA, 23 bp, Artificial Sequence
  human ApoB siRNA sequence
ttcatctggagtcattgctcccg

SEQ ID NO: 2812 - DNA, 23 bp, Artificial Sequence
  human ApoB siRNA sequence
tcatctggagtcattgctcccgg

SEQ ID NO: 2813 - DNA, 23 bp, Artificial Sequence
  human ApoB siRNA sequence
catctggagtcattgctcccgga

SEQ ID NO: 2814 - DNA, 23 bp, Artificial Sequence
  human ApoB siRNA sequence
atctggagtcattgctcccggag

SEQ ID NO: 2815 - DNA, 23 bp, Artificial Sequence
  human ApoB siRNA sequence
tctggagtcattgctcccggagc

SEQ ID NO: 2816 - DNA, 23 bp, Artificial Sequence
  human ApoB siRNA sequence
ctggagtcattgctcccggagcc

SEQ ID NO: 2817 - DNA, 23 bp, Artificial Sequence
  human ApoB siRNA sequence
tggagtcattgctcccggagcca

SEQ ID NO: 2818 - DNA, 23 bp, Artificial Sequence
  human ApoB siRNA sequence
ggagtcattgctcccggagccaa

SEQ ID NO: 2819 - DNA, 23 bp, Artificial Sequence
  human ApoB siRNA sequence
gagtcattgctcccggagccaag

SEQ ID NO: 2820 - DNA, 23 bp, Artificial Sequence
  human ApoB siRNA sequence
agtcattgctcccggagccaagg

SEQ ID NO: 2821 - DNA, 23 bp, Artificial Sequence
  human ApoB siRNA sequence
gtcattgctcccggagccaaggc

SEQ ID NO: 2822 - DNA, 23 bp, Artificial Sequence
  human ApoB siRNA sequence
tcattgctcccggagccaaggct

SEQ ID NO: 2823 - DNA, 23 bp, Artificial Sequence
  human ApoB siRNA sequence
cattgctcccggagccaaggctg

SEQ ID NO: 2824 - DNA, 23 bp, Artificial Sequence
  human ApoB siRNA sequence
attgctcccggagccaaggctgg

SEQ ID NO: 2825 - DNA, 23 bp, Artificial Sequence
  human ApoB siRNA sequence
ttgctcccggagccaaggctgga

SEQ ID NO: 2826 - DNA, 23 bp, Artificial Sequence
  human ApoB siRNA sequence
tgctcccggagccaaggctggag

SEQ ID NO: 2827 - DNA, 23 bp, Artificial Sequence
  human ApoB siRNA sequence
gctcccggagccaaggctggagt

SEQ ID NO: 2828 - DNA, 23 bp, Artificial Sequence
  human ApoB siRNA sequence
ctcccggagccaaggctggagta

SEQ ID NO: 2829 - DNA, 23 bp, Artificial Sequence
  human ApoB siRNA sequence
tcccggagccaaggctggagtaa

SEQ ID NO: 2830 - DNA, 23 bp, Artificial Sequence
  human ApoB siRNA sequence
cccggagccaaggctggagtaaa

SEQ ID NO: 2831 - DNA, 23 bp, Artificial Sequence
  human ApoB siRNA sequence
ccggagccaaggctggagtaaaa

SEQ ID NO: 2832 - DNA, 23 bp, Artificial Sequence
  human ApoB siRNA sequence
cggagccaaggctggagtaaaac

SEQ ID NO: 2833 - DNA, 23 bp, Artificial Sequence
  human ApoB siRNA sequence
ggagccaaggctggagtaaaact

SEQ ID NO: 2834 - DNA, 23 bp, Artificial Sequence
  human ApoB siRNA sequence
gagccaaggctggagtaaaactg

SEQ ID NO: 2835 - DNA, 23 bp, Artificial Sequence
  human ApoB siRNA sequence
agccaaggctggagtaaaactgg

SEQ ID NO: 2836 - DNA, 23 bp, Artificial Sequence
  human ApoB siRNA sequence
gccaaggctggagtaaaactgga

SEQ ID NO: 2837 - DNA, 23 bp, Artificial Sequence
  human ApoB siRNA sequence
ccaaggctggagtaaaactggaa

SEQ ID NO: 2838 - DNA, 23 bp, Artificial Sequence
  human ApoB siRNA sequence
caaggctggagtaaaactggaag

SEQ ID NO: 2839 - DNA, 23 bp, Artificial Sequence
  human ApoB siRNA sequence
aaggctggagtaaaactggaagt

SEQ ID NO: 2840 - DNA, 23 bp, Artificial Sequence
  human ApoB siRNA sequence
aggctggagtaaaactggaagta

SEQ ID NO: 2841 - DNA, 23 bp, Artificial Sequence
  human ApoB siRNA sequence
ggctggagtaaaactggaagtag

SEQ ID NO: 2842 - DNA, 23 bp, Artificial Sequence
  human ApoB siRNA sequence
gctggagtaaaactggaagtagc

SEQ ID NO: 2843 - DNA, 23 bp, Artificial Sequence
  human ApoB siRNA sequence
ctggagtaaaactggaagtagcc

SEQ ID NO: 2844 - DNA, 23 bp, Artificial Sequence
  human ApoB siRNA sequence
tggagtaaaactggaagtagcca

SEQ ID NO: 2845 - DNA, 23 bp, Artificial Sequence
  human ApoB siRNA sequence
ggagtaaaactggaagtagccaa

SEQ ID NO: 2846 - DNA, 23 bp, Artificial Sequence
  human ApoB siRNA sequence
gagtaaaactggaagtagccaac

SEQ ID NO: 2847 - DNA, 23 bp, Artificial Sequence
  human ApoB siRNA sequence
agtaaaactggaagtagccaaca

SEQ ID NO: 2848 - DNA, 23 bp, Artificial Sequence
  human ApoB siRNA sequence
gtaaaactggaagtagccaacat

SEQ ID NO: 2849 - DNA, 23 bp, Artificial Sequence
  human ApoB siRNA sequence
taaaactggaagtagccaacatg

SEQ ID NO: 2850 - DNA, 23 bp, Artificial Sequence
  human ApoB siRNA sequence
aaaactggaagtagccaacatgc

SEQ ID NO: 2851 - DNA, 23 bp, Artificial Sequence
  human ApoB siRNA sequence
aaactggaagtagccaacatgca

SEQ ID NO: 2852 - DNA, 23 bp, Artificial Sequence
  human ApoB siRNA sequence
aactggaagtagccaacatgcag

SEQ ID NO: 2853 - DNA, 23 bp, Artificial Sequence
  human ApoB siRNA sequence
actggaagtagccaacatgcagg

SEQ ID NO: 2854 - DNA, 23 bp, Artificial Sequence
  human ApoB siRNA sequence
ctggaagtagccaacatgcaggc

SEQ ID NO: 2855 - DNA, 23 bp, Artificial Sequence
  human ApoB siRNA sequence
tggaagtagccaacatgcaggct

SEQ ID NO: 2856 - DNA, 23 bp, Artificial Sequence
  human ApoB siRNA sequence
ggaagtagccaacatgcaggctg

SEQ ID NO: 2857 - DNA, 23 bp, Artificial Sequence
  human ApoB siRNA sequence
gaagtagccaacatgcaggctga

SEQ ID NO: 2858 - DNA, 23 bp, Artificial Sequence
  human ApoB siRNA sequence
aagtagccaacatgcaggctgaa

SEQ ID NO: 2859 - DNA, 23 bp, Artificial Sequence
  human ApoB siRNA sequence
agtagccaacatgcaggctgaac

SEQ ID NO: 2860 - DNA, 23 bp, Artificial Sequence
  human ApoB siRNA sequence
gtagccaacatgcaggctgaact

SEQ ID NO: 2861 - DNA, 23 bp, Artificial Sequence
  human ApoB siRNA sequence
tagccaacatgcaggctgaactg

SEQ ID NO: 2862 - DNA, 23 bp, Artificial Sequence
  human ApoB siRNA sequence
agccaacatgcaggctgaactgg

SEQ ID NO: 2863 - DNA, 23 bp, Artificial Sequence
  human ApoB siRNA sequence
gccaacatgcaggctgaactggt

SEQ ID NO: 2864 - DNA, 23 bp, Artificial Sequence
  human ApoB siRNA sequence
ccaacatgcaggctgaactggtg

SEQ ID NO: 2865 - DNA, 23 bp, Artificial Sequence
  human ApoB siRNA sequence
caacatgcaggctgaactggtgg

SEQ ID NO: 2866 - DNA, 23 bp, Artificial Sequence
  human ApoB siRNA sequence
aacatgcaggctgaactggtggc

SEQ ID NO: 2867 - DNA, 23 bp, Artificial Sequence
  human ApoB siRNA sequence
acatgcaggctgaactggtggca

SEQ ID NO: 2868 - DNA, 23 bp, Artificial Sequence
  human ApoB siRNA sequence
catgcaggctgaactggtggcaa

SEQ ID NO: 2869 - DNA, 23 bp, Artificial Sequence
  human ApoB siRNA sequence
atgcaggctgaactggtggcaaa

SEQ ID NO: 2870 - DNA, 23 bp, Artificial Sequence
  human ApoB siRNA sequence
tgcaggctgaactggtggcaaaa

SEQ ID NO: 2871 - DNA, 23 bp, Artificial Sequence
  human ApoB siRNA sequence
gcaggctgaactggtggcaaaac

SEQ ID NO: 2872 - DNA, 23 bp, Artificial Sequence
  human ApoB siRNA sequence
caggctgaactggtggcaaaacc

SEQ ID NO: 2873 - DNA, 23 bp, Artificial Sequence
  human ApoB siRNA sequence
aggctgaactggtggcaaaaccc

SEQ ID NO: 2874 - DNA, 23 bp, Artificial Sequence
  human ApoB siRNA sequence
ggctgaactggtggcaaaaccct

SEQ ID NO: 2875 - DNA, 23 bp, Artificial Sequence
  human ApoB siRNA sequence
gctgaactggtggcaaaaccctc

SEQ ID NO: 2876 - DNA, 23 bp, Artificial Sequence
  human ApoB siRNA sequence
ctgaactggtggcaaaaccctcc

SEQ ID NO: 2877 - DNA, 23 bp, Artificial Sequence
  human ApoB siRNA sequence
tgaactggtggcaaaaccctccg

SEQ ID NO: 2878 - DNA, 23 bp, Artificial Sequence
  human ApoB siRNA sequence
gaactggtggcaaaaccctccgt

SEQ ID NO: 2879 - DNA, 23 bp, Artificial Sequence
  human ApoB siRNA sequence
aactggtggcaaaaccctccgtg

SEQ ID NO: 2880 - DNA, 23 bp, Artificial Sequence
  human ApoB siRNA sequence
actggtggcaaaaccctccgtgt

SEQ ID NO: 2881 - DNA, 23 bp, Artificial Sequence
  human ApoB siRNA sequence
ctggtggcaaaaccctccgtgtc

SEQ ID NO: 2882 - DNA, 23 bp, Artificial Sequence
  human ApoB siRNA sequence
tggtggcaaaaccctccgtgtct

SEQ ID NO: 2883 - DNA, 23 bp, Artificial Sequence
  human ApoB siRNA sequence
ggtggcaaaaccctccgtgtctg

SEQ ID NO: 2884 - DNA, 23 bp, Artificial Sequence
  human ApoB siRNA sequence
gtggcaaaaccctccgtgtctgt

SEQ ID NO: 2885 - DNA, 23 bp, Artificial Sequence
  human ApoB siRNA sequence
tggcaaaaccctccgtgtctgtg

SEQ ID NO: 2886 - DNA, 23 bp, Artificial Sequence
  human ApoB siRNA sequence
ggcaaaaccctccgtgtctgtgg

SEQ ID NO: 2887 - DNA, 23 bp, Artificial Sequence
  human ApoB siRNA sequence
gcaaaaccctccgtgtctgtgga

SEQ ID NO: 2888 - DNA, 23 bp, Artificial Sequence
  human ApoB siRNA sequence
caaaaccctccgtgtctgtggag

SEQ ID NO: 2889 - DNA, 23 bp, Artificial Sequence
  human ApoB siRNA sequence
aaaaccctccgtgtctgtggagt

SEQ ID NO: 2890 - DNA, 23 bp, Artificial Sequence
  human ApoB siRNA sequence
aaaccctccgtgtctgtggagtt

SEQ ID NO: 2891 - DNA, 23 bp, Artificial Sequence
  human ApoB siRNA sequence
aaccctccgtgtctgtggagttt

SEQ ID NO: 2892 - DNA, 23 bp, Artificial Sequence
  human ApoB siRNA sequence
accctccgtgtctgtggagtttg

SEQ ID NO: 2893 - DNA, 23 bp, Artificial Sequence
  human ApoB siRNA sequence
ccctccgtgtctgtggagtttgt

SEQ ID NO: 2894 - DNA, 23 bp, Artificial Sequence
  human ApoB siRNA sequence
cctccgtgtctgtggagtttgtg

SEQ ID NO: 2895 - DNA, 23 bp, Artificial Sequence
  human ApoB siRNA sequence
ctccgtgtctgtggagtttgtga

SEQ ID NO: 2896 - DNA, 23 bp, Artificial Sequence
  human ApoB siRNA sequence
tccgtgtctgtggagtttgtgac

SEQ ID NO: 2897 - DNA, 23 bp, Artificial Sequence
  human ApoB siRNA sequence
ccgtgtctgtggagtttgtgaca

SEQ ID NO: 2898 - DNA, 23 bp, Artificial Sequence
  human ApoB siRNA sequence
cgtgtctgtggagtttgtgacaa

SEQ ID NO: 2899 - DNA, 23 bp, Artificial Sequence
  human ApoB siRNA sequence
gtgtctgtggagtttgtgacaaa

SEQ ID NO: 2900 - DNA, 23 bp, Artificial Sequence
  human ApoB siRNA sequence
tgtctgtggagtttgtgacaaat

SEQ ID NO: 2901 - DNA, 23 bp, Artificial Sequence
  human ApoB siRNA sequence
gtctgtggagtttgtgacaaata

SEQ ID NO: 2902 - DNA, 23 bp, Artificial Sequence
  human ApoB siRNA sequence
tctgtggagtttgtgacaaatat

SEQ ID NO: 2903 - DNA, 23 bp, Artificial Sequence
  human ApoB siRNA sequence
ctgtggagtttgtgacaaatatg

SEQ ID NO: 2904 - DNA, 23 bp, Artificial Sequence
  human ApoB siRNA sequence
tgtggagtttgtgacaaatatgg

SEQ ID NO: 2905 - DNA, 23 bp, Artificial Sequence
  human ApoB siRNA sequence
gtggagtttgtgacaaatatggg

SEQ ID NO: 2906 - DNA, 23 bp, Artificial Sequence
  human ApoB siRNA sequence
tggagtttgtgacaaatatgggc

SEQ ID NO: 2907 - DNA, 23 bp, Artificial Sequence
  human ApoB siRNA sequence
ggagtttgtgacaaatatgggca

SEQ ID NO: 2908 - DNA, 23 bp, Artificial Sequence
  human ApoB siRNA sequence
gagtttgtgacaaatatgggcat

SEQ ID NO: 2909 - DNA, 23 bp, Artificial Sequence
  human ApoB siRNA sequence
agtttgtgacaaatatgggcatc

SEQ ID NO: 2910 - DNA, 23 bp, Artificial Sequence
  human ApoB siRNA sequence
gtttgtgacaaatatgggcatca

SEQ ID NO: 2911 - DNA, 23 bp, Artificial Sequence
  human ApoB siRNA sequence
tttgtgacaaatatgggcatcat

SEQ ID NO: 2912 - DNA, 23 bp, Artificial Sequence
  human ApoB siRNA sequence
ttgtgacaaatatgggcatcatc

SEQ ID NO: 2913 - DNA, 23 bp, Artificial Sequence
  human ApoB siRNA sequence
tgtgacaaatatgggcatcatca

SEQ ID NO: 2914 - DNA, 23 bp, Artificial Sequence
  human ApoB siRNA sequence
gtgacaaatatgggcatcatcat

SEQ ID NO: 2915 - DNA, 23 bp, Artificial Sequence
  human ApoB siRNA sequence
tgacaaatatgggcatcatcatt

SEQ ID NO: 2916 - DNA, 23 bp, Artificial Sequence
  human ApoB siRNA sequence
gacaaatatgggcatcatcattc

SEQ ID NO: 2917 - DNA, 23 bp, Artificial Sequence
  human ApoB siRNA sequence
acaaatatgggcatcatcattcc

SEQ ID NO: 2918 - DNA, 23 bp, Artificial Sequence
  human ApoB siRNA sequence
caaatatgggcatcatcattccg

SEQ ID NO: 2919 - DNA, 23 bp, Artificial Sequence
  human ApoB siRNA sequence
aaatatgggcatcatcattccgg

SEQ ID NO: 2920 - DNA, 23 bp, Artificial Sequence
  human ApoB siRNA sequence
aatatgggcatcatcattccgga

SEQ ID NO: 2921 - DNA, 23 bp, Artificial Sequence
  human ApoB siRNA sequence
atatgggcatcatcattccggac

SEQ ID NO: 2922 - DNA, 23 bp, Artificial Sequence
  human ApoB siRNA sequence
tatgggcatcatcattccggact

SEQ ID NO: 2923 - DNA, 23 bp, Artificial Sequence
  human ApoB siRNA sequence
atgggcatcatcattccggactt

SEQ ID NO: 2924 - DNA, 23 bp, Artificial Sequence
  human ApoB siRNA sequence
tgggcatcatcattccggacttc

SEQ ID NO: 2925 - DNA, 23 bp, Artificial Sequence
  human ApoB siRNA sequence
gggcatcatcattccggacttcg

SEQ ID NO: 2926 - DNA, 23 bp, Artificial Sequence
  human ApoB siRNA sequence
ggcatcatcattccggacttcgc

SEQ ID NO: 2927 - DNA, 23 bp, Artificial Sequence
  human ApoB siRNA sequence
gcatcatcattccggacttcgct

SEQ ID NO: 2928 - DNA, 23 bp, Artificial Sequence
  human ApoB siRNA sequence
catcatcattccggacttcgcta

SEQ ID NO: 2929 - DNA, 23 bp, Artificial Sequence
  human ApoB siRNA sequence
atcatcattccggacttcgctag

SEQ ID NO: 2930 - DNA, 23 bp, Artificial Sequence
  human ApoB siRNA sequence
tcatcattccggacttcgctagg

SEQ ID NO: 2931 - DNA, 23 bp, Artificial Sequence
  human ApoB siRNA sequence
catcattccggacttcgctagga

SEQ ID NO: 2932 - DNA, 23 bp, Artificial Sequence
  human ApoB siRNA sequence
atcattccggacttcgctaggag

SEQ ID NO: 2933 - DNA, 23 bp, Artificial Sequence
  human ApoB siRNA sequence
tcattccggacttcgctaggagt

SEQ ID NO: 2934 - DNA, 23 bp, Artificial Sequence
  human ApoB siRNA sequence
cattccggacttcgctaggagtg

SEQ ID NO: 2935 - DNA, 23 bp, Artificial Sequence
  human ApoB siRNA sequence
attccggacttcgctaggagtgg

SEQ ID NO: 2936 - DNA, 23 bp, Artificial Sequence
  human ApoB siRNA sequence
ttccggacttcgctaggagtggg

SEQ ID NO: 2937 - DNA, 23 bp, Artificial Sequence
  human ApoB siRNA sequence
tccggacttcgctaggagtgggg

SEQ ID NO: 2938 - DNA, 23 bp, Artificial Sequence
  human ApoB siRNA sequence
ccggacttcgctaggagtggggt

SEQ ID NO: 2939 - DNA, 23 bp, Artificial Sequence
  human ApoB siRNA sequence
cggacttcgctaggagtggggtc

SEQ ID NO: 2940 - DNA, 23 bp, Artificial Sequence
  human ApoB siRNA sequence
ggacttcgctaggagtggggtcc

SEQ ID NO: 2941 - DNA, 23 bp, Artificial Sequence
  human ApoB siRNA sequence
gacttcgctaggagtggggtcca

SEQ ID NO: 2942 - DNA, 23 bp, Artificial Sequence
  human ApoB siRNA sequence
acttcgctaggagtggggtccag

SEQ ID NO: 2943 - DNA, 23 bp, Artificial Sequence
  human ApoB siRNA sequence
cttcgctaggagtggggtccaga

SEQ ID NO: 2944 - DNA, 23 bp, Artificial Sequence
  human ApoB siRNA sequence
ttcgctaggagtggggtccagat

SEQ ID NO: 2945 - DNA, 23 bp, Artificial Sequence
  human ApoB siRNA sequence
tcgctaggagtggggtccagatg

SEQ ID NO: 2946 - DNA, 23 bp, Artificial Sequence
  human ApoB siRNA sequence
cgctaggagtggggtccagatga

SEQ ID NO: 2947 - DNA, 23 bp, Artificial Sequence
  human ApoB siRNA sequence
gctaggagtggggtccagatgaa

SEQ ID NO: 2948 - DNA, 23 bp, Artificial Sequence
  human ApoB siRNA sequence
ctaggagtggggtccagatgaac

SEQ ID NO: 2949 - DNA, 23 bp, Artificial Sequence
  human ApoB siRNA sequence
taggagtggggtccagatgaaca

SEQ ID NO: 2950 - DNA, 23 bp, Artificial Sequence
  human ApoB siRNA sequence
aggagtggggtccagatgaacac

SEQ ID NO: 2951 - DNA, 23 bp, Artificial Sequence
  human ApoB siRNA sequence
ggagtggggtccagatgaacacc

SEQ ID NO: 2952 - DNA, 23 bp, Artificial Sequence
  human ApoB siRNA sequence
gagtggggtccagatgaacacca

SEQ ID NO: 2953 - DNA, 23 bp, Artificial Sequence
  human ApoB siRNA sequence
agtggggtccagatgaacaccaa

SEQ ID NO: 2954 - DNA, 23 bp, Artificial Sequence
  human ApoB siRNA sequence
gtggggtccagatgaacaccaac

SEQ ID NO: 2955 - DNA, 23 bp, Artificial Sequence
  human ApoB siRNA sequence
tggggtccagatgaacaccaact

SEQ ID NO: 2956 - DNA, 23 bp, Artificial Sequence
  human ApoB siRNA sequence
ggggtccagatgaacaccaactt

SEQ ID NO: 2957 - DNA, 23 bp, Artificial Sequence
  human ApoB siRNA sequence
gggtccagatgaacaccaacttc

SEQ ID NO: 2958 - DNA, 23 bp, Artificial Sequence
  human ApoB siRNA sequence
ggtccagatgaacaccaacttct

SEQ ID NO: 2959 - DNA, 23 bp, Artificial Sequence
  human ApoB siRNA sequence
gtccagatgaacaccaacttctt

SEQ ID NO: 2960 - DNA, 23 bp, Artificial Sequence
  human ApoB siRNA sequence
tccagatgaacaccaacttcttc

SEQ ID NO: 2961 - DNA, 23 bp, Artificial Sequence
  human ApoB siRNA sequence
ccagatgaacaccaacttcttcc

SEQ ID NO: 2962 - DNA, 23 bp, Artificial Sequence
  human ApoB siRNA sequence
cagatgaacaccaacttcttcca

SEQ ID NO: 2963 - DNA, 23 bp, Artificial Sequence
  human ApoB siRNA sequence
agatgaacaccaacttcttccac

SEQ ID NO: 2964 - DNA, 23 bp, Artificial Sequence
  human ApoB siRNA sequence
gatgaacaccaacttcttccacg

SEQ ID NO: 2965 - DNA, 23 bp, Artificial Sequence
  human ApoB siRNA sequence
atgaacaccaacttcttccacga

SEQ ID NO: 2966 - DNA, 23 bp, Artificial Sequence
  human ApoB siRNA sequence
tgaacaccaacttcttccacgag

SEQ ID NO: 2967 - DNA, 23 bp, Artificial Sequence
  human ApoB siRNA sequence
gaacaccaacttcttccacgagt

SEQ ID NO: 2968 - DNA, 23 bp, Artificial Sequence
  human ApoB siRNA sequence
aacaccaacttcttccacgagtc

SEQ ID NO: 2969 - DNA, 23 bp, Artificial Sequence
  human ApoB siRNA sequence
acaccaacttcttccacgagtcg

SEQ ID NO: 2970 - DNA, 23 bp, Artificial Sequence
  human ApoB siRNA sequence
caccaacttcttccacgagtcgg

SEQ ID NO: 2971 - DNA, 23 bp, Artificial Sequence
  human ApoB siRNA sequence
accaacttcttccacgagtcggg

SEQ ID NO: 2972 - DNA, 23 bp, Artificial Sequence
  human ApoB siRNA sequence
ccaacttcttccacgagtcgggt

SEQ ID NO: 2973 - DNA, 23 bp, Artificial Sequence
  human ApoB siRNA sequence
caacttcttccacgagtcgggtc

SEQ ID NO: 2974 - DNA, 23 bp, Artificial Sequence
  human ApoB siRNA sequence
aacttcttccacgagtcgggtct

SEQ ID NO: 2975 - DNA, 23 bp, Artificial Sequence
  human ApoB siRNA sequence
acttcttccacgagtcgggtctg

SEQ ID NO: 2976 - DNA, 23 bp, Artificial Sequence
  human ApoB siRNA sequence
cttcttccacgagtcgggtctgg

SEQ ID NO: 2977 - DNA, 23 bp, Artificial Sequence
  human ApoB siRNA sequence
ttcttccacgagtcgggtctgga

SEQ ID NO: 2978 - DNA, 23 bp, Artificial Sequence
  human ApoB siRNA sequence
tcttccacgagtcgggtctggag

SEQ ID NO: 2979 - DNA, 23 bp, Artificial Sequence
  human ApoB siRNA sequence
cttccacgagtcgggtctggagg

SEQ ID NO: 2980 - DNA, 23 bp, Artificial Sequence
  human ApoB siRNA sequence
ttccacgagtcgggtctggaggc

SEQ ID NO: 2981 - DNA, 23 bp, Artificial Sequence
  human ApoB siRNA sequence
tccacgagtcgggtctggaggct

SEQ ID NO: 2982 - DNA, 23 bp, Artificial Sequence
  human ApoB siRNA sequence
ccacgagtcgggtctggaggctc

SEQ ID NO: 2983 - DNA, 23 bp, Artificial Sequence
  human ApoB siRNA sequence
cacgagtcgggtctggaggctca

SEQ ID NO: 2984 - DNA, 23 bp, Artificial Sequence
  human ApoB siRNA sequence
acgagtcgggtctggaggctcat

SEQ ID NO: 2985 - DNA, 23 bp, Artificial Sequence
  human ApoB siRNA sequence
cgagtcgggtctggaggctcatg

SEQ ID NO: 2986 - DNA, 23 bp, Artificial Sequence
  human ApoB siRNA sequence
gagtcgggtctggaggctcatgt

SEQ ID NO: 2987 - DNA, 23 bp, Artificial Sequence
  human ApoB siRNA sequence
agtcgggtctggaggctcatgtt

SEQ ID NO: 2988 - DNA, 23 bp, Artificial Sequence
  human ApoB siRNA sequence
gtcgggtctggaggctcatgttg

SEQ ID NO: 2989 - DNA, 23 bp, Artificial Sequence
  human ApoB siRNA sequence
tcgggtctggaggctcatgttgc

SEQ ID NO: 2990 - DNA, 23 bp, Artificial Sequence
  human ApoB siRNA sequence
cgggtctggaggctcatgttgcc

SEQ ID NO: 2991 - DNA, 23 bp, Artificial Sequence
  human ApoB siRNA sequence
gggtctggaggctcatgttgccc

SEQ ID NO: 2992 - DNA, 23 bp, Artificial Sequence
  human ApoB siRNA sequence
ggtctggaggctcatgttgccct

SEQ ID NO: 2993 - DNA, 23 bp, Artificial Sequence
  human ApoB siRNA sequence
gtctggaggctcatgttgcccta

SEQ ID NO: 2994 - DNA, 23 bp, Artificial Sequence
  human ApoB siRNA sequence
tctggaggctcatgttgccctaa

SEQ ID NO: 2995 - DNA, 23 bp, Artificial Sequence
  human ApoB siRNA sequence
ctggaggctcatgttgccctaaa

SEQ ID NO: 2996 - DNA, 23 bp, Artificial Sequence
  human ApoB siRNA sequence
tggaggctcatgttgccctaaaa

SEQ ID NO: 2997 - DNA, 23 bp, Artificial Sequence
  human ApoB siRNA sequence
ggaggctcatgttgccctaaaag

SEQ ID NO: 2998 - DNA, 23 bp, Artificial Sequence
  human ApoB siRNA sequence
gaggctcatgttgccctaaaagc

SEQ ID NO: 2999 - DNA, 23 bp, Artificial Sequence
  human ApoB siRNA sequence
aggctcatgttgccctaaaagct

SEQ ID NO: 3000 - DNA, 23 bp, Artificial Sequence
  human ApoB siRNA sequence
ggctcatgttgccctaaaagctg

SEQ ID NO: 3001 - DNA, 23 bp, Artificial Sequence
  human ApoB siRNA sequence
gctcatgttgccctaaaagctgg

SEQ ID NO: 3002 - DNA, 23 bp, Artificial Sequence
  human ApoB siRNA sequence
ctcatgttgccctaaaagctggg

SEQ ID NO: 3003 - DNA, 23 bp, Artificial Sequence
  human ApoB siRNA sequence
tcatgttgccctaaaagctggga

SEQ ID NO: 3004 - DNA, 23 bp, Artificial Sequence
  human ApoB siRNA sequence
catgttgccctaaaagctgggaa

SEQ ID NO: 3005 - DNA, 23 bp, Artificial Sequence
  human ApoB siRNA sequence
atgttgccctaaaagctgggaag

SEQ ID NO: 3006 - DNA, 23 bp, Artificial Sequence
  human ApoB siRNA sequence
tgttgccctaaaagctgggaagc

SEQ ID NO: 3007 - DNA, 23 bp, Artificial Sequence
  human ApoB siRNA sequence
gttgccctaaaagctgggaagct

SEQ ID NO: 3008 - DNA, 23 bp, Artificial Sequence
  human ApoB siRNA sequence
ttgccctaaaagctgggaagctg

SEQ ID NO: 3009 - DNA, 23 bp, Artificial Sequence
  human ApoB siRNA sequence
tgccctaaaagctgggaagctga

SEQ ID NO: 3010 - DNA, 23 bp, Artificial Sequence
  human ApoB siRNA sequence
gccctaaaagctgggaagctgaa

SEQ ID NO: 3011 - DNA, 23 bp, Artificial Sequence
  human ApoB siRNA sequence
ccctaaaagctgggaagctgaag

SEQ ID NO: 3012 - DNA, 23 bp, Artificial Sequence
  human ApoB siRNA sequence
cctaaaagctgggaagctgaagt

SEQ ID NO: 3013 - DNA, 23 bp, Artificial Sequence
  human ApoB siRNA sequence
ctaaaagctgggaagctgaagtt

SEQ ID NO: 3014 - DNA, 23 bp, Artificial Sequence
  human ApoB siRNA sequence
taaaagctgggaagctgaagttt

SEQ ID NO: 3015 - DNA, 23 bp, Artificial Sequence
  human ApoB siRNA sequence
aaaagctgggaagctgaagttta

SEQ ID NO: 3016 - DNA, 23 bp, Artificial Sequence
  human ApoB siRNA sequence
aaagctgggaagctgaagtttat

SEQ ID NO: 3017 - DNA, 23 bp, Artificial Sequence
  human ApoB siRNA sequence
aagctgggaagctgaagtttatc

SEQ ID NO: 3018 - DNA, 23 bp, Artificial Sequence
  human ApoB siRNA sequence
agctgggaagctgaagtttatca

SEQ ID NO: 3019 - DNA, 23 bp, Artificial Sequence
  human ApoB siRNA sequence
gctgggaagctgaagtttatcat

SEQ ID NO: 3020 - DNA, 23 bp, Artificial Sequence
  human ApoB siRNA sequence
ctgggaagctgaagtttatcatt

SEQ ID NO: 3021 - DNA, 23 bp, Artificial Sequence
  human ApoB siRNA sequence
tgggaagctgaagtttatcattc

SEQ ID NO: 3022 - DNA, 23 bp, Artificial Sequence
  human ApoB siRNA sequence
gggaagctgaagtttatcattcc

SEQ ID NO: 3023 - DNA, 23 bp, Artificial Sequence
  human ApoB siRNA sequence
ggaagctgaagtttatcattcct

SEQ ID NO: 3024 - DNA, 23 bp, Artificial Sequence
  human ApoB siRNA sequence
gaagctgaagtttatcattcctt

SEQ ID NO: 3025 - DNA, 23 bp, Artificial Sequence
  human ApoB siRNA sequence
aagctgaagtttatcattccttc

SEQ ID NO: 3026 - DNA, 23 bp, Artificial Sequence
  human ApoB siRNA sequence
agctgaagtttatcattccttcc

SEQ ID NO: 3027 - DNA, 23 bp, Artificial Sequence
  human ApoB siRNA sequence
gctgaagtttatcattccttccc

SEQ ID NO: 3028 - DNA, 23 bp, Artificial Sequence
  human ApoB siRNA sequence
ctgaagtttatcattccttcccc

SEQ ID NO: 3029 - DNA, 23 bp, Artificial Sequence
  human ApoB siRNA sequence
tgaagtttatcattccttcccca

SEQ ID NO: 3030 - DNA, 23 bp, Artificial Sequence
  human ApoB siRNA sequence
gaagtttatcattccttccccaa

SEQ ID NO: 3031 - DNA, 23 bp, Artificial Sequence
  human ApoB siRNA sequence
aagtttatcattccttccccaaa

SEQ ID NO: 3032 - DNA, 23 bp, Artificial Sequence
  human ApoB siRNA sequence
agtttatcattccttccccaaag

SEQ ID NO: 3033 - DNA, 23 bp, Artificial Sequence
  human ApoB siRNA sequence
gtttatcattccttccccaaaga

SEQ ID NO: 3034 - DNA, 23 bp, Artificial Sequence
  human ApoB siRNA sequence
tttatcattccttccccaaagag

SEQ ID NO: 3035 - DNA, 23 bp, Artificial Sequence
  human ApoB siRNA sequence
ttatcattccttccccaaagaga

SEQ ID NO: 3036 - DNA, 23 bp, Artificial Sequence
  human ApoB siRNA sequence
tatcattccttccccaaagagac

SEQ ID NO: 3037 - DNA, 23 bp, Artificial Sequence
  human ApoB siRNA sequence
atcattccttccccaaagagacc

SEQ ID NO: 3038 - DNA, 23 bp, Artificial Sequence
  human ApoB siRNA sequence
tcattccttccccaaagagacca

SEQ ID NO: 3039 - DNA, 23 bp, Artificial Sequence
  human ApoB siRNA sequence
cattccttccccaaagagaccag

SEQ ID NO: 3040 - DNA, 23 bp, Artificial Sequence
  human ApoB siRNA sequence
attccttccccaaagagaccagt

SEQ ID NO: 3041 - DNA, 23 bp, Artificial Sequence
  human ApoB siRNA sequence
ttccttccccaaagagaccagtc

SEQ ID NO: 3042 - DNA, 23 bp, Artificial Sequence
  human ApoB siRNA sequence
tccttccccaaagagaccagtca

SEQ ID NO: 3043 - DNA, 23 bp, Artificial Sequence
  human ApoB siRNA sequence
ccttccccaaagagaccagtcaa

SEQ ID NO: 3044 - DNA, 23 bp, Artificial Sequence
  human ApoB siRNA sequence
cttccccaaagagaccagtcaag

SEQ ID NO: 3045 - DNA, 23 bp, Artificial Sequence
  human ApoB siRNA sequence
ttccccaaagagaccagtcaagc

SEQ ID NO: 3046 - DNA, 23 bp, Artificial Sequence
  human ApoB siRNA sequence
tccccaaagagaccagtcaagct

SEQ ID NO: 3047 - DNA, 23 bp, Artificial Sequence
  human ApoB siRNA sequence
ccccaaagagaccagtcaagctg

SEQ ID NO: 3048 - DNA, 23 bp, Artificial Sequence
  human ApoB siRNA sequence
cccaaagagaccagtcaagctgc

SEQ ID NO: 3049 - DNA, 23 bp, Artificial Sequence
  human ApoB siRNA sequence
ccaaagagaccagtcaagctgct

SEQ ID NO: 3050 - DNA, 23 bp, Artificial Sequence
  human ApoB siRNA sequence
caaagagaccagtcaagctgctc

SEQ ID NO: 3051 - DNA, 23 bp, Artificial Sequence
  human ApoB siRNA sequence
aaagagaccagtcaagctgctca

SEQ ID NO: 3052 - DNA, 23 bp, Artificial Sequence
  human ApoB siRNA sequence
aagagaccagtcaagctgctcag

SEQ ID NO: 3053 - DNA, 23 bp, Artificial Sequence
  human ApoB siRNA sequence
agagaccagtcaagctgctcagt

SEQ ID NO: 3054 - DNA, 23 bp, Artificial Sequence
  human ApoB siRNA sequence
gagaccagtcaagctgctcagtg

SEQ ID NO: 3055 - DNA, 23 bp, Artificial Sequence
  human ApoB siRNA sequence
agaccagtcaagctgctcagtgg

SEQ ID NO: 3056 - DNA, 23 bp, Artificial Sequence
  human ApoB siRNA sequence
gaccagtcaagctgctcagtgga

SEQ ID NO: 3057 - DNA, 23 bp, Artificial Sequence
  human ApoB siRNA sequence
accagtcaagctgctcagtggag

SEQ ID NO: 3058 - DNA, 23 bp, Artificial Sequence
  human ApoB siRNA sequence
ccagtcaagctgctcagtggagg

SEQ ID NO: 3059 - DNA, 23 bp, Artificial Sequence
  human ApoB siRNA sequence
cagtcaagctgctcagtggaggc

SEQ ID NO: 3060 - DNA, 23 bp, Artificial Sequence
  human ApoB siRNA sequence
agtcaagctgctcagtggaggca

SEQ ID NO: 3061 - DNA, 23 bp, Artificial Sequence
  human ApoB siRNA sequence
gtcaagctgctcagtggaggcaa

SEQ ID NO: 3062 - DNA, 23 bp, Artificial Sequence
  human ApoB siRNA sequence
tcaagctgctcagtggaggcaac

SEQ ID NO: 3063 - DNA, 23 bp, Artificial Sequence
  human ApoB siRNA sequence
caagctgctcagtggaggcaaca

SEQ ID NO: 3064 - DNA, 23 bp, Artificial Sequence
  human ApoB siRNA sequence
aagctgctcagtggaggcaacac

SEQ ID NO: 3065 - DNA, 23 bp, Artificial Sequence
  human ApoB siRNA sequence
agctgctcagtggaggcaacaca

SEQ ID NO: 3066 - DNA, 23 bp, Artificial Sequence
  human ApoB siRNA sequence
gctgctcagtggaggcaacacat

SEQ ID NO: 3067 - DNA, 23 bp, Artificial Sequence
  human ApoB siRNA sequence
ctgctcagtggaggcaacacatt

SEQ ID NO: 3068 - DNA, 23 bp, Artificial Sequence
  human ApoB siRNA sequence
tgctcagtggaggcaacacatta

SEQ ID NO: 3069 - DNA, 23 bp, Artificial Sequence
  human ApoB siRNA sequence
gctcagtggaggcaacacattac

SEQ ID NO: 3070 - DNA, 23 bp, Artificial Sequence
  human ApoB siRNA sequence
ctcagtggaggcaacacattaca

SEQ ID NO: 3071 - DNA, 23 bp, Artificial Sequence
  human ApoB siRNA sequence
tcagtggaggcaacacattacat

SEQ ID NO: 3072 - DNA, 23 bp, Artificial Sequence
  human ApoB siRNA sequence
cagtggaggcaacacattacatt

SEQ ID NO: 3073 - DNA, 23 bp, Artificial Sequence
  human ApoB siRNA sequence
agtggaggcaacacattacattt

SEQ ID NO: 3074 - DNA, 23 bp, Artificial Sequence
  human ApoB siRNA sequence
gtggaggcaacacattacatttg

SEQ ID NO: 3075 - DNA, 23 bp, Artificial Sequence
  human ApoB siRNA sequence
tggaggcaacacattacatttgg

SEQ ID NO: 3076 - DNA, 23 bp, Artificial Sequence
  human ApoB siRNA sequence
ggaggcaacacattacatttggt

SEQ ID NO: 3077 - DNA, 23 bp, Artificial Sequence
  human ApoB siRNA sequence
gaggcaacacattacatttggtc

SEQ ID NO: 3078 - DNA, 23 bp, Artificial Sequence
  human ApoB siRNA sequence
aggcaacacattacatttggtct

SEQ ID NO: 3079 - DNA, 23 bp, Artificial Sequence
  human ApoB siRNA sequence
ggcaacacattacatttggtctc

SEQ ID NO: 3080 - DNA, 23 bp, Artificial Sequence
  human ApoB siRNA sequence
gcaacacattacatttggtctct

SEQ ID NO: 3081 - DNA, 23 bp, Artificial Sequence
  human ApoB siRNA sequence
caacacattacatttggtctcta

SEQ ID NO: 3082 - DNA, 23 bp, Artificial Sequence
  human ApoB siRNA sequence
aacacattacatttggtctctac

SEQ ID NO: 3083 - DNA, 23 bp, Artificial Sequence
  human ApoB siRNA sequence
acacattacatttggtctctacc

SEQ ID NO: 3084 - DNA, 23 bp, Artificial Sequence
  human ApoB siRNA sequence
cacattacatttggtctctacca

SEQ ID NO: 3085 - DNA, 23 bp, Artificial Sequence
  human ApoB siRNA sequence
acattacatttggtctctaccac

SEQ ID NO: 3086 - DNA, 23 bp, Artificial Sequence
  human ApoB siRNA sequence
cattacatttggtctctaccacc

SEQ ID NO: 3087 - DNA, 23 bp, Artificial Sequence
  human ApoB siRNA sequence
attacatttggtctctaccacca

SEQ ID NO: 3088 - DNA, 23 bp, Artificial Sequence
  human ApoB siRNA sequence
ttacatttggtctctaccaccaa

SEQ ID NO: 3089 - DNA, 23 bp, Artificial Sequence
  human ApoB siRNA sequence
tacatttggtctctaccaccaaa

SEQ ID NO: 3090 - DNA, 23 bp, Artificial Sequence
  human ApoB siRNA sequence
acatttggtctctaccaccaaaa

SEQ ID NO: 3091 - DNA, 23 bp, Artificial Sequence
  human ApoB siRNA sequence
catttggtctctaccaccaaaac

SEQ ID NO: 3092 - DNA, 23 bp, Artificial Sequence
  human ApoB siRNA sequence
atttggtctctaccaccaaaacg

SEQ ID NO: 3093 - DNA, 23 bp, Artificial Sequence
  human ApoB siRNA sequence
tttggtctctaccaccaaaacgg

SEQ ID NO: 3094 - DNA, 23 bp, Artificial Sequence
  human ApoB siRNA sequence
ttggtctctaccaccaaaacgga

SEQ ID NO: 3095 - DNA, 23 bp, Artificial Sequence
  human ApoB siRNA sequence
tggtctctaccaccaaaacggag

SEQ ID NO: 3096 - DNA, 23 bp, Artificial Sequence
  human ApoB siRNA sequence
ggtctctaccaccaaaacggagg

SEQ ID NO: 3097 - DNA, 23 bp, Artificial Sequence
  human ApoB siRNA sequence
gtctctaccaccaaaacggaggt

SEQ ID NO: 3098 - DNA, 23 bp, Artificial Sequence
  human ApoB siRNA sequence
tctctaccaccaaaacggaggtg

SEQ ID NO: 3099 - DNA, 23 bp, Artificial Sequence
  human ApoB siRNA sequence
ctctaccaccaaaacggaggtga

SEQ ID NO: 3100 - DNA, 23 bp, Artificial Sequence
  human ApoB siRNA sequence
tctaccaccaaaacggaggtgat

SEQ ID NO: 3101 - DNA, 23 bp, Artificial Sequence
  human ApoB siRNA sequence
ctaccaccaaaacggaggtgatc

SEQ ID NO: 3102 - DNA, 23 bp, Artificial Sequence
  human ApoB siRNA sequence
taccaccaaaacggaggtgatcc

SEQ ID NO: 3103 - DNA, 23 bp, Artificial Sequence
  human ApoB siRNA sequence
accaccaaaacggaggtgatccc

SEQ ID NO: 3104 - DNA, 23 bp, Artificial Sequence
  human ApoB siRNA sequence
ccaccaaaacggaggtgatccca

SEQ ID NO: 3105 - DNA, 23 bp, Artificial Sequence
  human ApoB siRNA sequence
caccaaaacggaggtgatcccac

SEQ ID NO: 3106 - DNA, 23 bp, Artificial Sequence
  human ApoB siRNA sequence
accaaaacggaggtgatcccacc

SEQ ID NO: 3107 - DNA, 23 bp, Artificial Sequence
  human ApoB siRNA sequence
ccaaaacggaggtgatcccacct

SEQ ID NO: 3108 - DNA, 23 bp, Artificial Sequence
  human ApoB siRNA sequence
caaaacggaggtgatcccacctc

SEQ ID NO: 3109 - DNA, 23 bp, Artificial Sequence
  human ApoB siRNA sequence
aaaacggaggtgatcccacctct

SEQ ID NO: 3110 - DNA, 23 bp, Artificial Sequence
  human ApoB siRNA sequence
aaacggaggtgatcccacctctc

SEQ ID NO: 3111 - DNA, 23 bp, Artificial Sequence
  human ApoB siRNA sequence
aacggaggtgatcccacctctca

SEQ ID NO: 3112 - DNA, 23 bp, Artificial Sequence
  human ApoB siRNA sequence
acggaggtgatcccacctctcat

SEQ ID NO: 3113 - DNA, 23 bp, Artificial Sequence
  human ApoB siRNA sequence
cggaggtgatcccacctctcatt

SEQ ID NO: 3114 - DNA, 23 bp, Artificial Sequence
  human ApoB siRNA sequence
ggaggtgatcccacctctcattg

SEQ ID NO: 3115 - DNA, 23 bp, Artificial Sequence
  human ApoB siRNA sequence
gaggtgatcccacctctcattga

SEQ ID NO: 3116 - DNA, 23 bp, Artificial Sequence
  human ApoB siRNA sequence
aggtgatcccacctctcattgag

SEQ ID NO: 3117 - DNA, 23 bp, Artificial Sequence
  human ApoB siRNA sequence
ggtgatcccacctctcattgaga

SEQ ID NO: 3118 - DNA, 23 bp, Artificial Sequence
  human ApoB siRNA sequence
gtgatcccacctctcattgagaa

SEQ ID NO: 3119 - DNA, 23 bp, Artificial Sequence
  human ApoB siRNA sequence
tgatcccacctctcattgagaac

SEQ ID NO: 3120 - DNA, 23 bp, Artificial Sequence
  human ApoB siRNA sequence
gatcccacctctcattgagaaca

SEQ ID NO: 3121 - DNA, 23 bp, Artificial Sequence
  human ApoB siRNA sequence
atcccacctctcattgagaacag

SEQ ID NO: 3122 - DNA, 23 bp, Artificial Sequence
  human ApoB siRNA sequence
tcccacctctcattgagaacagg

SEQ ID NO: 3123 - DNA, 23 bp, Artificial Sequence
  human ApoB siRNA sequence
cccacctctcattgagaacaggc

SEQ ID NO: 3124 - DNA, 23 bp, Artificial Sequence
  human ApoB siRNA sequence
ccacctctcattgagaacaggca

SEQ ID NO: 3125 - DNA, 23 bp, Artificial Sequence
  human ApoB siRNA sequence
cacctctcattgagaacaggcag

SEQ ID NO: 3126 - DNA, 23 bp, Artificial Sequence
  human ApoB siRNA sequence
acctctcattgagaacaggcagt

SEQ ID NO: 3127 - DNA, 23 bp, Artificial Sequence
  human ApoB siRNA sequence
cctctcattgagaacaggcagtc

SEQ ID NO: 3128 - DNA, 23 bp, Artificial Sequence
  human ApoB siRNA sequence
ctctcattgagaacaggcagtcc

SEQ ID NO: 3129 - DNA, 23 bp, Artificial Sequence
  human ApoB siRNA sequence
tctcattgagaacaggcagtcct

SEQ ID NO: 3130 - DNA, 23 bp, Artificial Sequence
  human ApoB siRNA sequence
ctcattgagaacaggcagtcctg

SEQ ID NO: 3131 - DNA, 23 bp, Artificial Sequence
  human ApoB siRNA sequence
tcattgagaacaggcagtcctgg

SEQ ID NO: 3132 - DNA, 23 bp, Artificial Sequence
  human ApoB siRNA sequence
cattgagaacaggcagtcctggt

SEQ ID NO: 3133 - DNA, 23 bp, Artificial Sequence
  human ApoB siRNA sequence
attgagaacaggcagtcctggtc

SEQ ID NO: 3134 - DNA, 23 bp, Artificial Sequence
  human ApoB siRNA sequence
ttgagaacaggcagtcctggtca

SEQ ID NO: 3135 - DNA, 23 bp, Artificial Sequence
  human ApoB siRNA sequence
tgagaacaggcagtcctggtcag

SEQ ID NO: 3136 - DNA, 23 bp, Artificial Sequence
  human ApoB siRNA sequence
gagaacaggcagtcctggtcagt

SEQ ID NO: 3137 - DNA, 23 bp, Artificial Sequence
  human ApoB siRNA sequence
agaacaggcagtcctggtcagtt

SEQ ID NO: 3138 - DNA, 23 bp, Artificial Sequence
  human ApoB siRNA sequence
gaacaggcagtcctggtcagttt

SEQ ID NO: 3139 - DNA, 23 bp, Artificial Sequence
  human ApoB siRNA sequence
aacaggcagtcctggtcagtttg

SEQ ID NO: 3140 - DNA, 23 bp, Artificial Sequence
  human ApoB siRNA sequence
acaggcagtcctggtcagtttgc

SEQ ID NO: 3141 - DNA, 23 bp, Artificial Sequence
  human ApoB siRNA sequence
caggcagtcctggtcagtttgca

SEQ ID NO: 3142 - DNA, 23 bp, Artificial Sequence
  human ApoB siRNA sequence
aggcagtcctggtcagtttgcaa

SEQ ID NO: 3143 - DNA, 23 bp, Artificial Sequence
  human ApoB siRNA sequence
ggcagtcctggtcagtttgcaag

SEQ ID NO: 3144 - DNA, 23 bp, Artificial Sequence
  human ApoB siRNA sequence
gcagtcctggtcagtttgcaagc

SEQ ID NO: 3145 - DNA, 23 bp, Artificial Sequence
  human ApoB siRNA sequence
cagtcctggtcagtttgcaagca

SEQ ID NO: 3146 - DNA, 23 bp, Artificial Sequence
  human ApoB siRNA sequence
agtcctggtcagtttgcaagcaa

SEQ ID NO: 3147 - DNA, 23 bp, Artificial Sequence
  human ApoB siRNA sequence
gtcctggtcagtttgcaagcaag

SEQ ID NO: 3148 - DNA, 23 bp, Artificial Sequence
  human ApoB siRNA sequence
tcctggtcagtttgcaagcaagt

SEQ ID NO: 3149 - DNA, 23 bp, Artificial Sequence
  human ApoB siRNA sequence
cctggtcagtttgcaagcaagtc

SEQ ID NO: 3150 - DNA, 23 bp, Artificial Sequence
  human ApoB siRNA sequence
ctggtcagtttgcaagcaagtct

SEQ ID NO: 3151 - DNA, 23 bp, Artificial Sequence
  human ApoB siRNA sequence
tggtcagtttgcaagcaagtctt

SEQ ID NO: 3152 - DNA, 23 bp, Artificial Sequence
  human ApoB siRNA sequence
ggtcagtttgcaagcaagtcttt

SEQ ID NO: 3153 - DNA, 23 bp, Artificial Sequence
  human ApoB siRNA sequence
gtcagtttgcaagcaagtctttc

SEQ ID NO: 3154 - DNA, 23 bp, Artificial Sequence
  human ApoB siRNA sequence
tcagtttgcaagcaagtctttcc

SEQ ID NO: 3155 - DNA, 23 bp, Artificial Sequence
  human ApoB siRNA sequence
cagtttgcaagcaagtctttcct

SEQ ID NO: 3156 - DNA, 23 bp, Artificial Sequence
  human ApoB siRNA sequence
agtttgcaagcaagtctttcctg

SEQ ID NO: 3157 - DNA, 23 bp, Artificial Sequence
  human ApoB siRNA sequence
gtttgcaagcaagtctttcctgg

SEQ ID NO: 3158 - DNA, 23 bp, Artificial Sequence
  human ApoB siRNA sequence
tttgcaagcaagtctttcctggc

SEQ ID NO: 3159 - DNA, 23 bp, Artificial Sequence
  human ApoB siRNA sequence
ttgcaagcaagtctttcctggcc

SEQ ID NO: 3160 - DNA, 23 bp, Artificial Sequence
  human ApoB siRNA sequence
tgcaagcaagtctttcctggcct

SEQ ID NO: 3161 - DNA, 23 bp, Artificial Sequence
  human ApoB siRNA sequence
gcaagcaagtctttcctggcctg

SEQ ID NO: 3162 - DNA, 23 bp, Artificial Sequence
  human ApoB siRNA sequence
caagcaagtctttcctggcctga

SEQ ID NO: 3163 - DNA, 23 bp, Artificial Sequence
  human ApoB siRNA sequence
aagcaagtctttcctggcctgaa

SEQ ID NO: 3164 - DNA, 23 bp, Artificial Sequence
  human ApoB siRNA sequence
agcaagtctttcctggcctgaat

SEQ ID NO: 3165 - DNA, 23 bp, Artificial Sequence
  human ApoB siRNA sequence
gcaagtctttcctggcctgaatt

SEQ ID NO: 3166 - DNA, 23 bp, Artificial Sequence
  human ApoB siRNA sequence
caagtctttcctggcctgaatta

SEQ ID NO: 3167 - DNA, 23 bp, Artificial Sequence
  human ApoB siRNA sequence
aagtctttcctggcctgaattac

SEQ ID NO: 3168 - DNA, 23 bp, Artificial Sequence
  human ApoB siRNA sequence
agtctttcctggcctgaattact

SEQ ID NO: 3169 - DNA, 23 bp, Artificial Sequence
  human ApoB siRNA sequence
gtctttcctggcctgaattactg

SEQ ID NO: 3170 - DNA, 23 bp, Artificial Sequence
  human ApoB siRNA sequence
tctttcctggcctgaattactgc

SEQ ID NO: 3171 - DNA, 23 bp, Artificial Sequence
  human ApoB siRNA sequence
ctttcctggcctgaattactgca

SEQ ID NO: 3172 - DNA, 23 bp, Artificial Sequence
  human ApoB siRNA sequence
tttcctggcctgaattactgcac

SEQ ID NO: 3173 - DNA, 23 bp, Artificial Sequence
  human ApoB siRNA sequence
ttcctggcctgaattactgcacc

SEQ ID NO: 3174 - DNA, 23 bp, Artificial Sequence
  human ApoB siRNA sequence
tcctggcctgaattactgcacct

SEQ ID NO: 3175 - DNA, 23 bp, Artificial Sequence
  human ApoB siRNA sequence
cctggcctgaattactgcacctc

SEQ ID NO: 3176 - DNA, 23 bp, Artificial Sequence
  human ApoB siRNA sequence
ctggcctgaattactgcacctca

SEQ ID NO: 3177 - DNA, 23 bp, Artificial Sequence
  human ApoB siRNA sequence
tggcctgaattactgcacctcag

SEQ ID NO: 3178 - DNA, 23 bp, Artificial Sequence
  human ApoB siRNA sequence
ggcctgaattactgcacctcagg

SEQ ID NO: 3179 - DNA, 23 bp, Artificial Sequence
  human ApoB siRNA sequence
gcctgaattactgcacctcaggc

SEQ ID NO: 3180 - DNA, 23 bp, Artificial Sequence
  human ApoB siRNA sequence
cctgaattactgcacctcaggcg

SEQ ID NO: 3181 - DNA, 23 bp, Artificial Sequence
  human ApoB siRNA sequence
ctgaattactgcacctcaggcgc

SEQ ID NO: 3182 - DNA, 23 bp, Artificial Sequence
  human ApoB siRNA sequence
tgaattactgcacctcaggcgct

SEQ ID NO: 3183 - DNA, 23 bp, Artificial Sequence
  human ApoB siRNA sequence
gaattactgcacctcaggcgctt

SEQ ID NO: 3184 - DNA, 23 bp, Artificial Sequence
  human ApoB siRNA sequence
aattactgcacctcaggcgctta

SEQ ID NO: 3185 - DNA, 23 bp, Artificial Sequence
  human ApoB siRNA sequence
attactgcacctcaggcgcttac

SEQ ID NO: 3186 - DNA, 23 bp, Artificial Sequence
  human ApoB siRNA sequence
ttactgcacctcaggcgcttact

SEQ ID NO: 3187 - DNA, 23 bp, Artificial Sequence
  human ApoB siRNA sequence
tactgcacctcaggcgcttactc

SEQ ID NO: 3188 - DNA, 23 bp, Artificial Sequence
  human ApoB siRNA sequence
actgcacctcaggcgcttactcc

SEQ ID NO: 3189 - DNA, 23 bp, Artificial Sequence
  human ApoB siRNA sequence
ctgcacctcaggcgcttactcca

SEQ ID NO: 3190 - DNA, 23 bp, Artificial Sequence
  human ApoB siRNA sequence
tgcacctcaggcgcttactccaa

SEQ ID NO: 3191 - DNA, 23 bp, Artificial Sequence
  human ApoB siRNA sequence
gcacctcaggcgcttactccaac

SEQ ID NO: 3192 - DNA, 23 bp, Artificial Sequence
  human ApoB siRNA sequence
cacctcaggcgcttactccaacg

SEQ ID NO: 3193 - DNA, 23 bp, Artificial Sequence
  human ApoB siRNA sequence
acctcaggcgcttactccaacgc

SEQ ID NO: 3194 - DNA, 23 bp, Artificial Sequence
  human ApoB siRNA sequence
cctcaggcgcttactccaacgcc

SEQ ID NO: 3195 - DNA, 23 bp, Artificial Sequence
  human ApoB siRNA sequence
ctcaggcgcttactccaacgcca

SEQ ID NO: 3196 - DNA, 23 bp, Artificial Sequence
  human ApoB siRNA sequence
tcaggcgcttactccaacgccag

SEQ ID NO: 3197 - DNA, 23 bp, Artificial Sequence
  human ApoB siRNA sequence
caggcgcttactccaacgccagc

SEQ ID NO: 3198 - DNA, 23 bp, Artificial Sequence
  human ApoB siRNA sequence
aggcgcttactccaacgccagct

SEQ ID NO: 3199 - DNA, 23 bp, Artificial Sequence
  human ApoB siRNA sequence
ggcgcttactccaacgccagctc

SEQ ID NO: 3200 - DNA, 23 bp, Artificial Sequence
  human ApoB siRNA sequence
gcgcttactccaacgccagctcc

SEQ ID NO: 3201 - DNA, 23 bp, Artificial Sequence
  human ApoB siRNA sequence
cgcttactccaacgccagctcca

SEQ ID NO: 3202 - DNA, 23 bp, Artificial Sequence
  human ApoB siRNA sequence
gcttactccaacgccagctccac

SEQ ID NO: 3203 - DNA, 23 bp, Artificial Sequence
  human ApoB siRNA sequence
cttactccaacgccagctccaca

SEQ ID NO: 3204 - DNA, 23 bp, Artificial Sequence
  human ApoB siRNA sequence
ttactccaacgccagctccacag

SEQ ID NO: 3205 - DNA, 23 bp, Artificial Sequence
  human ApoB siRNA sequence
tactccaacgccagctccacaga

SEQ ID NO: 3206 - DNA, 23 bp, Artificial Sequence
  human ApoB siRNA sequence
actccaacgccagctccacagac

SEQ ID NO: 3207 - DNA, 23 bp, Artificial Sequence
  human ApoB siRNA sequence
ctccaacgccagctccacagact

SEQ ID NO: 3208 - DNA, 23 bp, Artificial Sequence
  human ApoB siRNA sequence
tccaacgccagctccacagactc

SEQ ID NO: 3209 - DNA, 23 bp, Artificial Sequence
  human ApoB siRNA sequence
ccaacgccagctccacagactcc

SEQ ID NO: 3210 - DNA, 23 bp, Artificial Sequence
  human ApoB siRNA sequence
caacgccagctccacagactccg

SEQ ID NO: 3211 - DNA, 23 bp, Artificial Sequence
  human ApoB siRNA sequence
aacgccagctccacagactccgc

SEQ ID NO: 3212 - DNA, 23 bp, Artificial Sequence
  human ApoB siRNA sequence
acgccagctccacagactccgcc

SEQ ID NO: 3213 - DNA, 23 bp, Artificial Sequence
  human ApoB siRNA sequence
cgccagctccacagactccgcct

SEQ ID NO: 3214 - DNA, 23 bp, Artificial Sequence
  human ApoB siRNA sequence
gccagctccacagactccgcctc

SEQ ID NO: 3215 - DNA, 23 bp, Artificial Sequence
  human ApoB siRNA sequence
ccagctccacagactccgcctcc

SEQ ID NO: 3216 - DNA, 23 bp, Artificial Sequence
  human ApoB siRNA sequence
cagctccacagactccgcctcct

SEQ ID NO: 3217 - DNA, 23 bp, Artificial Sequence
  human ApoB siRNA sequence
agctccacagactccgcctccta

SEQ ID NO: 3218 - DNA, 23 bp, Artificial Sequence
  human ApoB siRNA sequence
gctccacagactccgcctcctac

SEQ ID NO: 3219 - DNA, 23 bp, Artificial Sequence
  human ApoB siRNA sequence
ctccacagactccgcctcctact

SEQ ID NO: 3220 - DNA, 23 bp, Artificial Sequence
  human ApoB siRNA sequence
tccacagactccgcctcctacta

SEQ ID NO: 3221 - DNA, 23 bp, Artificial Sequence
  human ApoB siRNA sequence
ccacagactccgcctcctactat

SEQ ID NO: 3222 - DNA, 23 bp, Artificial Sequence
  human ApoB siRNA sequence
cacagactccgcctcctactatc

SEQ ID NO: 3223 - DNA, 23 bp, Artificial Sequence
  human ApoB siRNA sequence
acagactccgcctcctactatcc

SEQ ID NO: 3224 - DNA, 23 bp, Artificial Sequence
  human ApoB siRNA sequence
cagactccgcctcctactatccg

SEQ ID NO: 3225 - DNA, 23 bp, Artificial Sequence
  human ApoB siRNA sequence
agactccgcctcctactatccgc

SEQ ID NO: 3226 - DNA, 23 bp, Artificial Sequence
  human ApoB siRNA sequence
gactccgcctcctactatccgct

SEQ ID NO: 3227 - DNA, 23 bp, Artificial Sequence
  human ApoB siRNA sequence
actccgcctcctactatccgctg

SEQ ID NO: 3228 - DNA, 23 bp, Artificial Sequence
  human ApoB siRNA sequence
ctccgcctcctactatccgctga

SEQ ID NO: 3229 - DNA, 23 bp, Artificial Sequence
  human ApoB siRNA sequence
tccgcctcctactatccgctgac

SEQ ID NO: 3230 - DNA, 23 bp, Artificial Sequence
  human ApoB siRNA sequence
ccgcctcctactatccgctgacc

SEQ ID NO: 3231 - DNA, 23 bp, Artificial Sequence
  human ApoB siRNA sequence
cgcctcctactatccgctgaccg

SEQ ID NO: 3232 - DNA, 23 bp, Artificial Sequence
  human ApoB siRNA sequence
gcctcctactatccgctgaccgg

SEQ ID NO: 3233 - DNA, 23 bp, Artificial Sequence
  human ApoB siRNA sequence
cctcctactatccgctgaccggg

SEQ ID NO: 3234 - DNA, 23 bp, Artificial Sequence
  human ApoB siRNA sequence
ctcctactatccgctgaccgggg

SEQ ID NO: 3235 - DNA, 23 bp, Artificial Sequence
  human ApoB siRNA sequence
tcctactatccgctgaccgggga

SEQ ID NO: 3236 - DNA, 23 bp, Artificial Sequence
  human ApoB siRNA sequence
cctactatccgctgaccggggac

SEQ ID NO: 3237 - DNA, 23 bp, Artificial Sequence
  human ApoB siRNA sequence
ctactatccgctgaccggggaca

SEQ ID NO: 3238 - DNA, 23 bp, Artificial Sequence
  human ApoB siRNA sequence
tactatccgctgaccggggacac

SEQ ID NO: 3239 - DNA, 23 bp, Artificial Sequence
  human ApoB siRNA sequence
actatccgctgaccggggacacc

SEQ ID NO: 3240 - DNA, 23 bp, Artificial Sequence
  human ApoB siRNA sequence
ctatccgctgaccggggacacca

SEQ ID NO: 3241 - DNA, 23 bp, Artificial Sequence
  human ApoB siRNA sequence
tatccgctgaccggggacaccag

SEQ ID NO: 3242 - DNA, 23 bp, Artificial Sequence
  human ApoB siRNA sequence
atccgctgaccggggacaccaga

SEQ ID NO: 3243 - DNA, 23 bp, Artificial Sequence
  human ApoB siRNA sequence
tccgctgaccggggacaccagat

SEQ ID NO: 3244 - DNA, 23 bp, Artificial Sequence
  human ApoB siRNA sequence
ccgctgaccggggacaccagatt

SEQ ID NO: 3245 - DNA, 23 bp, Artificial Sequence
  human ApoB siRNA sequence
cgctgaccggggacaccagatta

SEQ ID NO: 3246 - DNA, 23 bp, Artificial Sequence
  human ApoB siRNA sequence
gctgaccggggacaccagattag

SEQ ID NO: 3247 - DNA, 23 bp, Artificial Sequence
  human ApoB siRNA sequence
ctgaccggggacaccagattaga

SEQ ID NO: 3248 - DNA, 23 bp, Artificial Sequence
  human ApoB siRNA sequence
tgaccggggacaccagattagag

SEQ ID NO: 3249 - DNA, 23 bp, Artificial Sequence
  human ApoB siRNA sequence
gaccggggacaccagattagagc

SEQ ID NO: 3250 - DNA, 23 bp, Artificial Sequence
  human ApoB siRNA sequence
accggggacaccagattagagct

SEQ ID NO: 3251 - DNA, 23 bp, Artificial Sequence
  human ApoB siRNA sequence
ccggggacaccagattagagctg

SEQ ID NO: 3252 - DNA, 23 bp, Artificial Sequence
  human ApoB siRNA sequence
cggggacaccagattagagctgg

SEQ ID NO: 3253 - DNA, 23 bp, Artificial Sequence
  human ApoB siRNA sequence
ggggacaccagattagagctgga

SEQ ID NO: 3254 - DNA, 23 bp, Artificial Sequence
  human ApoB siRNA sequence
gggacaccagattagagctggaa

SEQ ID NO: 3255 - DNA, 23 bp, Artificial Sequence
  human ApoB siRNA sequence
ggacaccagattagagctggaac

SEQ ID NO: 3256 - DNA, 23 bp, Artificial Sequence
  human ApoB siRNA sequence
gacaccagattagagctggaact

SEQ ID NO: 3257 - DNA, 23 bp, Artificial Sequence
  human ApoB siRNA sequence
acaccagattagagctggaactg

SEQ ID NO: 3258 - DNA, 23 bp, Artificial Sequence
  human ApoB siRNA sequence
caccagattagagctggaactga

SEQ ID NO: 3259 - DNA, 23 bp, Artificial Sequence
  human ApoB siRNA sequence
accagattagagctggaactgag

SEQ ID NO: 3260 - DNA, 23 bp, Artificial Sequence
  human ApoB siRNA sequence
ccagattagagctggaactgagg

SEQ ID NO: 3261 - DNA, 23 bp, Artificial Sequence
  human ApoB siRNA sequence
cagattagagctggaactgaggc

SEQ ID NO: 3262 - DNA, 23 bp, Artificial Sequence
  human ApoB siRNA sequence
agattagagctggaactgaggcc

SEQ ID NO: 3263 - DNA, 23 bp, Artificial Sequence
  human ApoB siRNA sequence
gattagagctggaactgaggcct

SEQ ID NO: 3264 - DNA, 23 bp, Artificial Sequence
  human ApoB siRNA sequence
attagagctggaactgaggccta

SEQ ID NO: 3265 - DNA, 23 bp, Artificial Sequence
  human ApoB siRNA sequence
ttagagctggaactgaggcctac

SEQ ID NO: 3266 - DNA, 23 bp, Artificial Sequence
  human ApoB siRNA sequence
tagagctggaactgaggcctaca

SEQ ID NO: 3267 - DNA, 23 bp, Artificial Sequence
  human ApoB siRNA sequence
agagctggaactgaggcctacag

SEQ ID NO: 3268 - DNA, 23 bp, Artificial Sequence
  human ApoB siRNA sequence
gagctggaactgaggcctacagg

SEQ ID NO: 3269 - DNA, 23 bp, Artificial Sequence
  human ApoB siRNA sequence
agctggaactgaggcctacagga

SEQ ID NO: 3270 - DNA, 23 bp, Artificial Sequence
  human ApoB siRNA sequence
gctggaactgaggcctacaggag

SEQ ID NO: 3271 - DNA, 23 bp, Artificial Sequence
  human ApoB siRNA sequence
ctggaactgaggcctacaggaga

SEQ ID NO: 3272 - DNA, 23 bp, Artificial Sequence
  human ApoB siRNA sequence
tggaactgaggcctacaggagag

SEQ ID NO: 3273 - DNA, 23 bp, Artificial Sequence
  human ApoB siRNA sequence
ggaactgaggcctacaggagaga

SEQ ID NO: 3274 - DNA, 23 bp, Artificial Sequence
  human ApoB siRNA sequence
gaactgaggcctacaggagagat

SEQ ID NO: 3275 - DNA, 23 bp, Artificial Sequence
  human ApoB siRNA sequence
aactgaggcctacaggagagatt

SEQ ID NO: 3276 - DNA, 23 bp, Artificial Sequence
  human ApoB siRNA sequence
actgaggcctacaggagagattg

SEQ ID NO: 3277 - DNA, 23 bp, Artificial Sequence
  human ApoB siRNA sequence
ctgaggcctacaggagagattga

SEQ ID NO: 3278 - DNA, 23 bp, Artificial Sequence
  human ApoB siRNA sequence
tgaggcctacaggagagattgag

SEQ ID NO: 3279 - DNA, 23 bp, Artificial Sequence
  human ApoB siRNA sequence
gaggcctacaggagagattgagc

SEQ ID NO: 3280 - DNA, 23 bp, Artificial Sequence
  human ApoB siRNA sequence
aggcctacaggagagattgagca

SEQ ID NO: 3281 - DNA, 23 bp, Artificial Sequence
  human ApoB siRNA sequence
ggcctacaggagagattgagcag

SEQ ID NO: 3282 - DNA, 23 bp, Artificial Sequence
  human ApoB siRNA sequence
gcctacaggagagattgagcagt

SEQ ID NO: 3283 - DNA, 23 bp, Artificial Sequence
  human ApoB siRNA sequence
cctacaggagagattgagcagta

SEQ ID NO: 3284 - DNA, 23 bp, Artificial Sequence
  human ApoB siRNA sequence
ctacaggagagattgagcagtat

SEQ ID NO: 3285 - DNA, 23 bp, Artificial Sequence
  human ApoB siRNA sequence
tacaggagagattgagcagtatt

SEQ ID NO: 3286 - DNA, 23 bp, Artificial Sequence
  human ApoB siRNA sequence
acaggagagattgagcagtattc

SEQ ID NO: 3287 - DNA, 23 bp, Artificial Sequence
  human ApoB siRNA sequence
caggagagattgagcagtattct

SEQ ID NO: 3288 - DNA, 23 bp, Artificial Sequence
  human ApoB siRNA sequence
aggagagattgagcagtattctg

SEQ ID NO: 3289 - DNA, 23 bp, Artificial Sequence
  human ApoB siRNA sequence
ggagagattgagcagtattctgt

SEQ ID NO: 3290 - DNA, 23 bp, Artificial Sequence
  human ApoB siRNA sequence
gagagattgagcagtattctgtc

SEQ ID NO: 3291 - DNA, 23 bp, Artificial Sequence
  human ApoB siRNA sequence
agagattgagcagtattctgtca

SEQ ID NO: 3292 - DNA, 23 bp, Artificial Sequence
  human ApoB siRNA sequence
gagattgagcagtattctgtcag

SEQ ID NO: 3293 - DNA, 23 bp, Artificial Sequence
  human ApoB siRNA sequence
agattgagcagtattctgtcagc

SEQ ID NO: 3294 - DNA, 23 bp, Artificial Sequence
  human ApoB siRNA sequence
gattgagcagtattctgtcagcg

SEQ ID NO: 3295 - DNA, 23 bp, Artificial Sequence
  human ApoB siRNA sequence
attgagcagtattctgtcagcgc

SEQ ID NO: 3296 - DNA, 23 bp, Artificial Sequence
  human ApoB siRNA sequence
ttgagcagtattctgtcagcgca

SEQ ID NO: 3297 - DNA, 23 bp, Artificial Sequence
  human ApoB siRNA sequence
tgagcagtattctgtcagcgcaa

SEQ ID NO: 3298 - DNA, 23 bp, Artificial Sequence
  human ApoB siRNA sequence
gagcagtattctgtcagcgcaac

SEQ ID NO: 3299 - DNA, 23 bp, Artificial Sequence
  human ApoB siRNA sequence
agcagtattctgtcagcgcaacc

SEQ ID NO: 3300 - DNA, 23 bp, Artificial Sequence
  human ApoB siRNA sequence
gcagtattctgtcagcgcaacct

SEQ ID NO: 3301 - DNA, 23 bp, Artificial Sequence
  human ApoB siRNA sequence
cagtattctgtcagcgcaaccta

SEQ ID NO: 3302 - DNA, 23 bp, Artificial Sequence
  human ApoB siRNA sequence
agtattctgtcagcgcaacctat

SEQ ID NO: 3303 - DNA, 23 bp, Artificial Sequence
  human ApoB siRNA sequence
gtattctgtcagcgcaacctatg

SEQ ID NO: 3304 - DNA, 23 bp, Artificial Sequence
  human ApoB siRNA sequence
tattctgtcagcgcaacctatga

SEQ ID NO: 3305 - DNA, 23 bp, Artificial Sequence
  human ApoB siRNA sequence
attctgtcagcgcaacctatgag

SEQ ID NO: 3306 - DNA, 23 bp, Artificial Sequence
  human ApoB siRNA sequence
ttctgtcagcgcaacctatgagc

SEQ ID NO: 3307 - DNA, 23 bp, Artificial Sequence
  human ApoB siRNA sequence
tctgtcagcgcaacctatgagct

SEQ ID NO: 3308 - DNA, 23 bp, Artificial Sequence
  human ApoB siRNA sequence
ctgtcagcgcaacctatgagctc

SEQ ID NO: 3309 - DNA, 23 bp, Artificial Sequence
  human ApoB siRNA sequence
tgtcagcgcaacctatgagctcc

SEQ ID NO: 3310 - DNA, 23 bp, Artificial Sequence
  human ApoB siRNA sequence
gtcagcgcaacctatgagctcca

SEQ ID NO: 3311 - DNA, 23 bp, Artificial Sequence
  human ApoB siRNA sequence
tcagcgcaacctatgagctccag

SEQ ID NO: 3312 - DNA, 23 bp, Artificial Sequence
  human ApoB siRNA sequence
cagcgcaacctatgagctccaga

SEQ ID NO: 3313 - DNA, 23 bp, Artificial Sequence
  human ApoB siRNA sequence
agcgcaacctatgagctccagag

SEQ ID NO: 3314 - DNA, 23 bp, Artificial Sequence
  human ApoB siRNA sequence
gcgcaacctatgagctccagaga

SEQ ID NO: 3315 - DNA, 23 bp, Artificial Sequence
  human ApoB siRNA sequence
cgcaacctatgagctccagagag

SEQ ID NO: 3316 - DNA, 23 bp, Artificial Sequence
  human ApoB siRNA sequence
gcaacctatgagctccagagaga

SEQ ID NO: 3317 - DNA, 23 bp, Artificial Sequence
  human ApoB siRNA sequence
caacctatgagctccagagagag

SEQ ID NO: 3318 - DNA, 23 bp, Artificial Sequence
  human ApoB siRNA sequence
aacctatgagctccagagagagg

SEQ ID NO: 3319 - DNA, 23 bp, Artificial Sequence
  human ApoB siRNA sequence
acctatgagctccagagagagga

SEQ ID NO: 3320 - DNA, 23 bp, Artificial Sequence
  human ApoB siRNA sequence
cctatgagctccagagagaggac

SEQ ID NO: 3321 - DNA, 23 bp, Artificial Sequence
  human ApoB siRNA sequence
ctatgagctccagagagaggaca

SEQ ID NO: 3322 - DNA, 23 bp, Artificial Sequence
  human ApoB siRNA sequence
tatgagctccagagagaggacag

SEQ ID NO: 3323 - DNA, 23 bp, Artificial Sequence
  human ApoB siRNA sequence
atgagctccagagagaggacaga

SEQ ID NO: 3324 - DNA, 23 bp, Artificial Sequence
  human ApoB siRNA sequence
tgagctccagagagaggacagag

SEQ ID NO: 3325 - DNA, 23 bp, Artificial Sequence
  human ApoB siRNA sequence
gagctccagagagaggacagagc

SEQ ID NO: 3326 - DNA, 23 bp, Artificial Sequence
  human ApoB siRNA sequence
agctccagagagaggacagagcc

SEQ ID NO: 3327 - DNA, 23 bp, Artificial Sequence
  human ApoB siRNA sequence
gctccagagagaggacagagcct

SEQ ID NO: 3328 - DNA, 23 bp, Artificial Sequence
  human ApoB siRNA sequence
ctccagagagaggacagagcctt

SEQ ID NO: 3329 - DNA, 23 bp, Artificial Sequence
  human ApoB siRNA sequence
tccagagagaggacagagccttg

SEQ ID NO: 3330 - DNA, 23 bp, Artificial Sequence
  human ApoB siRNA sequence
ccagagagaggacagagccttgg

SEQ ID NO: 3331 - DNA, 23 bp, Artificial Sequence
  human ApoB siRNA sequence
cagagagaggacagagccttggt

SEQ ID NO: 3332 - DNA, 23 bp, Artificial Sequence
  human ApoB siRNA sequence
agagagaggacagagccttggtg

SEQ ID NO: 3333 - DNA, 23 bp, Artificial Sequence
  human ApoB siRNA sequence
gagagaggacagagccttggtgg

SEQ ID NO: 3334 - DNA, 23 bp, Artificial Sequence
  human ApoB siRNA sequence
agagaggacagagccttggtgga

SEQ ID NO: 3335 - DNA, 23 bp, Artificial Sequence
  human ApoB siRNA sequence
gagaggacagagccttggtggat

SEQ ID NO: 3336 - DNA, 23 bp, Artificial Sequence
  human ApoB siRNA sequence
agaggacagagccttggtggata

SEQ ID NO: 3337 - DNA, 23 bp, Artificial Sequence
  human ApoB siRNA sequence
gaggacagagccttggtggatac

SEQ ID NO: 3338 - DNA, 23 bp, Artificial Sequence
  human ApoB siRNA sequence
aggacagagccttggtggatacc

SEQ ID NO: 3339 - DNA, 23 bp, Artificial Sequence
  human ApoB siRNA sequence
ggacagagccttggtggataccc

SEQ ID NO: 3340 - DNA, 23 bp, Artificial Sequence
  human ApoB siRNA sequence
gacagagccttggtggataccct

SEQ ID NO: 3341 - DNA, 23 bp, Artificial Sequence
  human ApoB siRNA sequence
acagagccttggtggataccctg

SEQ ID NO: 3342 - DNA, 23 bp, Artificial Sequence
  human ApoB siRNA sequence
cagagccttggtggataccctga

SEQ ID NO: 3343 - DNA, 23 bp, Artificial Sequence
  human ApoB siRNA sequence
agagccttggtggataccctgaa

SEQ ID NO: 3344 - DNA, 23 bp, Artificial Sequence
  human ApoB siRNA sequence
gagccttggtggataccctgaag

SEQ ID NO: 3345 - DNA, 23 bp, Artificial Sequence
  human ApoB siRNA sequence
agccttggtggataccctgaagt

SEQ ID NO: 3346 - DNA, 23 bp, Artificial Sequence
  human ApoB siRNA sequence
gccttggtggataccctgaagtt

SEQ ID NO: 3347 - DNA, 23 bp, Artificial Sequence
  human ApoB siRNA sequence
ccttggtggataccctgaagttt

SEQ ID NO: 3348 - DNA, 23 bp, Artificial Sequence
  human ApoB siRNA sequence
cttggtggataccctgaagtttg

SEQ ID NO: 3349 - DNA, 23 bp, Artificial Sequence
  human ApoB siRNA sequence
ttggtggataccctgaagtttgt

SEQ ID NO: 3350 - DNA, 23 bp, Artificial Sequence
  human ApoB siRNA sequence
tggtggataccctgaagtttgta

SEQ ID NO: 3351 - DNA, 23 bp, Artificial Sequence
  human ApoB siRNA sequence
ggtggataccctgaagtttgtaa

SEQ ID NO: 3352 - DNA, 23 bp, Artificial Sequence
  human ApoB siRNA sequence
gtggataccctgaagtttgtaac

SEQ ID NO: 3353 - DNA, 23 bp, Artificial Sequence
  human ApoB siRNA sequence
tggataccctgaagtttgtaact

SEQ ID NO: 3354 - DNA, 23 bp, Artificial Sequence
  human ApoB siRNA sequence
ggataccctgaagtttgtaactc

SEQ ID NO: 3355 - DNA, 23 bp, Artificial Sequence
  human ApoB siRNA sequence
gataccctgaagtttgtaactca

SEQ ID NO: 3356 - DNA, 23 bp, Artificial Sequence
  human ApoB siRNA sequence
ataccctgaagtttgtaactcaa

SEQ ID NO: 3357 - DNA, 23 bp, Artificial Sequence
  human ApoB siRNA sequence
taccctgaagtttgtaactcaag

SEQ ID NO: 3358 - DNA, 23 bp, Artificial Sequence
  human ApoB siRNA sequence
accctgaagtttgtaactcaagc

SEQ ID NO: 3359 - DNA, 23 bp, Artificial Sequence
  human ApoB siRNA sequence
ccctgaagtttgtaactcaagca

SEQ ID NO: 3360 - DNA, 23 bp, Artificial Sequence
  human ApoB siRNA sequence
cctgaagtttgtaactcaagcag

SEQ ID NO: 3361 - DNA, 23 bp, Artificial Sequence
  human ApoB siRNA sequence
ctgaagtttgtaactcaagcaga

SEQ ID NO: 3362 - DNA, 23 bp, Artificial Sequence
  human ApoB siRNA sequence
tgaagtttgtaactcaagcagaa

SEQ ID NO: 3363 - DNA, 23 bp, Artificial Sequence
  human ApoB siRNA sequence
gaagtttgtaactcaagcagaag

SEQ ID NO: 3364 - DNA, 23 bp, Artificial Sequence
  human ApoB siRNA sequence
aagtttgtaactcaagcagaagg

SEQ ID NO: 3365 - DNA, 23 bp, Artificial Sequence
  human ApoB siRNA sequence
agtttgtaactcaagcagaaggt

SEQ ID NO: 3366 - DNA, 23 bp, Artificial Sequence
  human ApoB siRNA sequence
gtttgtaactcaagcagaaggtg

SEQ ID NO: 3367 - DNA, 23 bp, Artificial Sequence
  human ApoB siRNA sequence
tttgtaactcaagcagaaggtgc

SEQ ID NO: 3368 - DNA, 23 bp, Artificial Sequence
  human ApoB siRNA sequence
ttgtaactcaagcagaaggtgcg

SEQ ID NO: 3369 - DNA, 23 bp, Artificial Sequence
  human ApoB siRNA sequence
tgtaactcaagcagaaggtgcga

SEQ ID NO: 3370 - DNA, 23 bp, Artificial Sequence
  human ApoB siRNA sequence
gtaactcaagcagaaggtgcgaa

SEQ ID NO: 3371 - DNA, 23 bp, Artificial Sequence
  human ApoB siRNA sequence
taactcaagcagaaggtgcgaag

SEQ ID NO: 3372 - DNA, 23 bp, Artificial Sequence
  human ApoB siRNA sequence
aactcaagcagaaggtgcgaagc

SEQ ID NO: 3373 - DNA, 23 bp, Artificial Sequence
  human ApoB siRNA sequence
actcaagcagaaggtgcgaagca

SEQ ID NO: 3374 - DNA, 23 bp, Artificial Sequence
  human ApoB siRNA sequence
ctcaagcagaaggtgcgaagcag

SEQ ID NO: 3375 - DNA, 23 bp, Artificial Sequence
  human ApoB siRNA sequence
tcaagcagaaggtgcgaagcaga

SEQ ID NO: 3376 - DNA, 23 bp, Artificial Sequence
  human ApoB siRNA sequence
caagcagaaggtgcgaagcagac

SEQ ID NO: 3377 - DNA, 23 bp, Artificial Sequence
  human ApoB siRNA sequence
aagcagaaggtgcgaagcagact

SEQ ID NO: 3378 - DNA, 23 bp, Artificial Sequence
  human ApoB siRNA sequence
agcagaaggtgcgaagcagactg

SEQ ID NO: 3379 - DNA, 23 bp, Artificial Sequence
  human ApoB siRNA sequence
gcagaaggtgcgaagcagactga

SEQ ID NO: 3380 - DNA, 23 bp, Artificial Sequence
  human ApoB siRNA sequence
cagaaggtgcgaagcagactgag

SEQ ID NO: 3381 - DNA, 23 bp, Artificial Sequence
  human ApoB siRNA sequence
agaaggtgcgaagcagactgagg

SEQ ID NO: 3382 - DNA, 23 bp, Artificial Sequence
  human ApoB siRNA sequence
gaaggtgcgaagcagactgaggc

SEQ ID NO: 3383 - DNA, 23 bp, Artificial Sequence
  human ApoB siRNA sequence
aaggtgcgaagcagactgaggct

SEQ ID NO: 3384 - DNA, 23 bp, Artificial Sequence
  human ApoB siRNA sequence
aggtgcgaagcagactgaggcta

SEQ ID NO: 3385 - DNA, 23 bp, Artificial Sequence
  human ApoB siRNA sequence
ggtgcgaagcagactgaggctac

SEQ ID NO: 3386 - DNA, 23 bp, Artificial Sequence
  human ApoB siRNA sequence
gtgcgaagcagactgaggctacc

SEQ ID NO: 3387 - DNA, 23 bp, Artificial Sequence
  human ApoB siRNA sequence
tgcgaagcagactgaggctacca

SEQ ID NO: 3388 - DNA, 23 bp, Artificial Sequence
  human ApoB siRNA sequence
gcgaagcagactgaggctaccat

SEQ ID NO: 3389 - DNA, 23 bp, Artificial Sequence
  human ApoB siRNA sequence
cgaagcagactgaggctaccatg

SEQ ID NO: 3390 - DNA, 23 bp, Artificial Sequence
  human ApoB siRNA sequence
gaagcagactgaggctaccatga

SEQ ID NO: 3391 - DNA, 23 bp, Artificial Sequence
  human ApoB siRNA sequence
aagcagactgaggctaccatgac

SEQ ID NO: 3392 - DNA, 23 bp, Artificial Sequence
  human ApoB siRNA sequence
agcagactgaggctaccatgaca

SEQ ID NO: 3393 - DNA, 23 bp, Artificial Sequence
  human ApoB siRNA sequence
gcagactgaggctaccatgacat

SEQ ID NO: 3394 - DNA, 23 bp, Artificial Sequence
  human ApoB siRNA sequence
cagactgaggctaccatgacatt

SEQ ID NO: 3395 - DNA, 23 bp, Artificial Sequence
  human ApoB siRNA sequence
agactgaggctaccatgacattc

SEQ ID NO: 3396 - DNA, 23 bp, Artificial Sequence
  human ApoB siRNA sequence
gactgaggctaccatgacattca

SEQ ID NO: 3397 - DNA, 23 bp, Artificial Sequence
  human ApoB siRNA sequence
actgaggctaccatgacattcaa

SEQ ID NO: 3398 - DNA, 23 bp, Artificial Sequence
  human ApoB siRNA sequence
ctgaggctaccatgacattcaaa

SEQ ID NO: 3399 - DNA, 23 bp, Artificial Sequence
  human ApoB siRNA sequence
tgaggctaccatgacattcaaat

SEQ ID NO: 3400 - DNA, 23 bp, Artificial Sequence
  human ApoB siRNA sequence
gaggctaccatgacattcaaata

SEQ ID NO: 3401 - DNA, 23 bp, Artificial Sequence
  human ApoB siRNA sequence
aggctaccatgacattcaaatat

SEQ ID NO: 3402 - DNA, 23 bp, Artificial Sequence
  human ApoB siRNA sequence
ggctaccatgacattcaaatata

SEQ ID NO: 3403 - DNA, 23 bp, Artificial Sequence
  human ApoB siRNA sequence
gctaccatgacattcaaatataa

SEQ ID NO: 3404 - DNA, 23 bp, Artificial Sequence
  human ApoB siRNA sequence
ctaccatgacattcaaatataat

SEQ ID NO: 3405 - DNA, 23 bp, Artificial Sequence
  human ApoB siRNA sequence
taccatgacattcaaatataatc

SEQ ID NO: 3406 - DNA, 23 bp, Artificial Sequence
  human ApoB siRNA sequence
accatgacattcaaatataatcg

SEQ ID NO: 3407 - DNA, 23 bp, Artificial Sequence
  human ApoB siRNA sequence
ccatgacattcaaatataatcgg

SEQ ID NO: 3408 - DNA, 23 bp, Artificial Sequence
  human ApoB siRNA sequence
catgacattcaaatataatcggc

SEQ ID NO: 3409 - DNA, 23 bp, Artificial Sequence
  human ApoB siRNA sequence
atgacattcaaatataatcggca

SEQ ID NO: 3410 - DNA, 23 bp, Artificial Sequence
  human ApoB siRNA sequence
tgacattcaaatataatcggcag

SEQ ID NO: 3411 - DNA, 23 bp, Artificial Sequence
  human ApoB siRNA sequence
gacattcaaatataatcggcaga

SEQ ID NO: 3412 - DNA, 23 bp, Artificial Sequence
  human ApoB siRNA sequence
acattcaaatataatcggcagag

SEQ ID NO: 3413 - DNA, 23 bp, Artificial Sequence
  human ApoB siRNA sequence
cattcaaatataatcggcagagt

SEQ ID NO: 3414 - DNA, 23 bp, Artificial Sequence
  human ApoB siRNA sequence
attcaaatataatcggcagagta

SEQ ID NO: 3415 - DNA, 23 bp, Artificial Sequence
  human ApoB siRNA sequence
ttcaaatataatcggcagagtat

SEQ ID NO: 3416 - DNA, 23 bp, Artificial Sequence
  human ApoB siRNA sequence
tcaaatataatcggcagagtatg

SEQ ID NO: 3417 - DNA, 23 bp, Artificial Sequence
  human ApoB siRNA sequence
caaatataatcggcagagtatga

SEQ ID NO: 3418 - DNA, 23 bp, Artificial Sequence
  human ApoB siRNA sequence
aaatataatcggcagagtatgac

SEQ ID NO: 3419 - DNA, 23 bp, Artificial Sequence
  human ApoB siRNA sequence
aatataatcggcagagtatgacc

SEQ ID NO: 3420 - DNA, 23 bp, Artificial Sequence
  human ApoB siRNA sequence
atataatcggcagagtatgacct

SEQ ID NO: 3421 - DNA, 23 bp, Artificial Sequence
  human ApoB siRNA sequence
tataatcggcagagtatgacctt

SEQ ID NO: 3422 - DNA, 23 bp, Artificial Sequence
  human ApoB siRNA sequence
ataatcggcagagtatgaccttg

SEQ ID NO: 3423 - DNA, 23 bp, Artificial Sequence
  human ApoB siRNA sequence
taatcggcagagtatgaccttgt

SEQ ID NO: 3424 - DNA, 23 bp, Artificial Sequence
  human ApoB siRNA sequence
aatcggcagagtatgaccttgtc

SEQ ID NO: 3425 - DNA, 23 bp, Artificial Sequence
  human ApoB siRNA sequence
atcggcagagtatgaccttgtcc

SEQ ID NO: 3426 - DNA, 23 bp, Artificial Sequence
  human ApoB siRNA sequence
tcggcagagtatgaccttgtcca

SEQ ID NO: 3427 - DNA, 23 bp, Artificial Sequence
  human ApoB siRNA sequence
cggcagagtatgaccttgtccag

SEQ ID NO: 3428 - DNA, 23 bp, Artificial Sequence
  human ApoB siRNA sequence
ggcagagtatgaccttgtccagt

SEQ ID NO: 3429 - DNA, 23 bp, Artificial Sequence
  human ApoB siRNA sequence
gcagagtatgaccttgtccagtg

SEQ ID NO: 3430 - DNA, 23 bp, Artificial Sequence
  human ApoB siRNA sequence
cagagtatgaccttgtccagtga

SEQ ID NO: 3431 - DNA, 23 bp, Artificial Sequence
  human ApoB siRNA sequence
agagtatgaccttgtccagtgaa

SEQ ID NO: 3432 - DNA, 23 bp, Artificial Sequence
  human ApoB siRNA sequence
gagtatgaccttgtccagtgaag

SEQ ID NO: 3433 - DNA, 23 bp, Artificial Sequence
  human ApoB siRNA sequence
agtatgaccttgtccagtgaagt

SEQ ID NO: 3434 - DNA, 23 bp, Artificial Sequence
  human ApoB siRNA sequence
gtatgaccttgtccagtgaagtc

SEQ ID NO: 3435 - DNA, 23 bp, Artificial Sequence
  human ApoB siRNA sequence
tatgaccttgtccagtgaagtcc

SEQ ID NO: 3436 - DNA, 23 bp, Artificial Sequence
  human ApoB siRNA sequence
atgaccttgtccagtgaagtcca

SEQ ID NO: 3437 - DNA, 23 bp, Artificial Sequence
  human ApoB siRNA sequence
tgaccttgtccagtgaagtccaa

SEQ ID NO: 3438 - DNA, 23 bp, Artificial Sequence
  human ApoB siRNA sequence
gaccttgtccagtgaagtccaaa

SEQ ID NO: 3439 - DNA, 23 bp, Artificial Sequence
  human ApoB siRNA sequence
accttgtccagtgaagtccaaat

SEQ ID NO: 3440 - DNA, 23 bp, Artificial Sequence
  human ApoB siRNA sequence
ccttgtccagtgaagtccaaatt

SEQ ID NO: 3441 - DNA, 23 bp, Artificial Sequence
  human ApoB siRNA sequence
cttgtccagtgaagtccaaattc

SEQ ID NO: 3442 - DNA, 23 bp, Artificial Sequence
  human ApoB siRNA sequence
ttgtccagtgaagtccaaattcc

SEQ ID NO: 3443 - DNA, 23 bp, Artificial Sequence
  human ApoB siRNA sequence
tgtccagtgaagtccaaattccg

SEQ ID NO: 3444 - DNA, 23 bp, Artificial Sequence
  human ApoB siRNA sequence
gtccagtgaagtccaaattccgg

SEQ ID NO: 3445 - DNA, 23 bp, Artificial Sequence
  human ApoB siRNA sequence
tccagtgaagtccaaattccgga

SEQ ID NO: 3446 - DNA, 23 bp, Artificial Sequence
  human ApoB siRNA sequence
ccagtgaagtccaaattccggat

SEQ ID NO: 3447 - DNA, 23 bp, Artificial Sequence
  human ApoB siRNA sequence
cagtgaagtccaaattccggatt

SEQ ID NO: 3448 - DNA, 23 bp, Artificial Sequence
  human ApoB siRNA sequence
agtgaagtccaaattccggattt

SEQ ID NO: 3449 - DNA, 23 bp, Artificial Sequence
  human ApoB siRNA sequence
gtgaagtccaaattccggatttt

SEQ ID NO: 3450 - DNA, 23 bp, Artificial Sequence
  human ApoB siRNA sequence
tgaagtccaaattccggattttg

SEQ ID NO: 3451 - DNA, 23 bp, Artificial Sequence
  human ApoB siRNA sequence
gaagtccaaattccggattttga

SEQ ID NO: 3452 - DNA, 23 bp, Artificial Sequence
  human ApoB siRNA sequence
aagtccaaattccggattttgat

SEQ ID NO: 3453 - DNA, 23 bp, Artificial Sequence
  human ApoB siRNA sequence
agtccaaattccggattttgatg

SEQ ID NO: 3454 - DNA, 23 bp, Artificial Sequence
  human ApoB siRNA sequence
gtccaaattccggattttgatgt

SEQ ID NO: 3455 - DNA, 23 bp, Artificial Sequence
  human ApoB siRNA sequence
tccaaattccggattttgatgtt

SEQ ID NO: 3456 - DNA, 23 bp, Artificial Sequence
  human ApoB siRNA sequence
ccaaattccggattttgatgttg

SEQ ID NO: 3457 - DNA, 23 bp, Artificial Sequence
  human ApoB siRNA sequence
caaattccggattttgatgttga

SEQ ID NO: 3458 - DNA, 23 bp, Artificial Sequence
  human ApoB siRNA sequence
aaattccggattttgatgttgac

SEQ ID NO: 3459 - DNA, 23 bp, Artificial Sequence
  human ApoB siRNA sequence
aattccggattttgatgttgacc

SEQ ID NO: 3460 - DNA, 23 bp, Artificial Sequence
  human ApoB siRNA sequence
attccggattttgatgttgacct

SEQ ID NO: 3461 - DNA, 23 bp, Artificial Sequence
  human ApoB siRNA sequence
ttccggattttgatgttgacctc

SEQ ID NO: 3462 - DNA, 23 bp, Artificial Sequence
  human ApoB siRNA sequence
tccggattttgatgttgacctcg

SEQ ID NO: 3463 - DNA, 23 bp, Artificial Sequence
  human ApoB siRNA sequence
ccggattttgatgttgacctcgg

SEQ ID NO: 3464 - DNA, 23 bp, Artificial Sequence
  human ApoB siRNA sequence
cggattttgatgttgacctcgga

SEQ ID NO: 3465 - DNA, 23 bp, Artificial Sequence
  human ApoB siRNA sequence
ggattttgatgttgacctcggaa

SEQ ID NO: 3466 - DNA, 23 bp, Artificial Sequence
  human ApoB siRNA sequence
gattttgatgttgacctcggaac

SEQ ID NO: 3467 - DNA, 23 bp, Artificial Sequence
  human ApoB siRNA sequence
attttgatgttgacctcggaaca

SEQ ID NO: 3468 - DNA, 23 bp, Artificial Sequence
  human ApoB siRNA sequence
ttttgatgttgacctcggaacaa

SEQ ID NO: 3469 - DNA, 23 bp, Artificial Sequence
  human ApoB siRNA sequence
tttgatgttgacctcggaacaat

SEQ ID NO: 3470 - DNA, 23 bp, Artificial Sequence
  human ApoB siRNA sequence
ttgatgttgacctcggaacaatc

SEQ ID NO: 3471 - DNA, 23 bp, Artificial Sequence
  human ApoB siRNA sequence
tgatgttgacctcggaacaatcc

SEQ ID NO: 3472 - DNA, 23 bp, Artificial Sequence
  human ApoB siRNA sequence
gatgttgacctcggaacaatcct

SEQ ID NO: 3473 - DNA, 23 bp, Artificial Sequence
  human ApoB siRNA sequence
atgttgacctcggaacaatcctc

SEQ ID NO: 3474 - DNA, 23 bp, Artificial Sequence
  human ApoB siRNA sequence
tgttgacctcggaacaatcctca

SEQ ID NO: 3475 - DNA, 23 bp, Artificial Sequence
  human ApoB siRNA sequence
gttgacctcggaacaatcctcag

SEQ ID NO: 3476 - DNA, 23 bp, Artificial Sequence
  human ApoB siRNA sequence
ttgacctcggaacaatcctcaga

SEQ ID NO: 3477 - DNA, 23 bp, Artificial Sequence
  human ApoB siRNA sequence
tgacctcggaacaatcctcagag

SEQ ID NO: 3478 - DNA, 23 bp, Artificial Sequence
  human ApoB siRNA sequence
gacctcggaacaatcctcagagt

SEQ ID NO: 3479 - DNA, 23 bp, Artificial Sequence
  human ApoB siRNA sequence
acctcggaacaatcctcagagtt

SEQ ID NO: 3480 - DNA, 23 bp, Artificial Sequence
  human ApoB siRNA sequence
cctcggaacaatcctcagagtta

SEQ ID NO: 3481 - DNA, 23 bp, Artificial Sequence
  human ApoB siRNA sequence
ctcggaacaatcctcagagttaa

SEQ ID NO: 3482 - DNA, 23 bp, Artificial Sequence
  human ApoB siRNA sequence
tcggaacaatcctcagagttaat

SEQ ID NO: 3483 - DNA, 23 bp, Artificial Sequence
  human ApoB siRNA sequence
cggaacaatcctcagagttaatg

SEQ ID NO: 3484 - DNA, 23 bp, Artificial Sequence
  human ApoB siRNA sequence
ggaacaatcctcagagttaatga

SEQ ID NO: 3485 - DNA, 23 bp, Artificial Sequence
  human ApoB siRNA sequence
gaacaatcctcagagttaatgat

SEQ ID NO: 3486 - DNA, 23 bp, Artificial Sequence
  human ApoB siRNA sequence
aacaatcctcagagttaatgatg

SEQ ID NO: 3487 - DNA, 23 bp, Artificial Sequence
  human ApoB siRNA sequence
acaatcctcagagttaatgatga

SEQ ID NO: 3488 - DNA, 23 bp, Artificial Sequence
  human ApoB siRNA sequence
caatcctcagagttaatgatgaa

SEQ ID NO: 3489 - DNA, 23 bp, Artificial Sequence
  human ApoB siRNA sequence
aatcctcagagttaatgatgaat

SEQ ID NO: 3490 - DNA, 23 bp, Artificial Sequence
  human ApoB siRNA sequence
atcctcagagttaatgatgaatc

SEQ ID NO: 3491 - DNA, 23 bp, Artificial Sequence
  human ApoB siRNA sequence
tcctcagagttaatgatgaatct

SEQ ID NO: 3492 - DNA, 23 bp, Artificial Sequence
  human ApoB siRNA sequence
cctcagagttaatgatgaatcta

SEQ ID NO: 3493 - DNA, 23 bp, Artificial Sequence
  human ApoB siRNA sequence
ctcagagttaatgatgaatctac

SEQ ID NO: 3494 - DNA, 23 bp, Artificial Sequence
  human ApoB siRNA sequence
tcagagttaatgatgaatctact

SEQ ID NO: 3495 - DNA, 23 bp, Artificial Sequence
  human ApoB siRNA sequence
cagagttaatgatgaatctactg

SEQ ID NO: 3496 - DNA, 23 bp, Artificial Sequence
  human ApoB siRNA sequence
agagttaatgatgaatctactga

SEQ ID NO: 3497 - DNA, 23 bp, Artificial Sequence
  human ApoB siRNA sequence
gagttaatgatgaatctactgag

SEQ ID NO: 3498 - DNA, 23 bp, Artificial Sequence
  human ApoB siRNA sequence
agttaatgatgaatctactgagg

SEQ ID NO: 3499 - DNA, 23 bp, Artificial Sequence
  human ApoB siRNA sequence
gttaatgatgaatctactgaggg

SEQ ID NO: 3500 - DNA, 23 bp, Artificial Sequence
  human ApoB siRNA sequence
ttaatgatgaatctactgagggc

SEQ ID NO: 3501 - DNA, 23 bp, Artificial Sequence
  human ApoB siRNA sequence
taatgatgaatctactgagggca

SEQ ID NO: 3502 - DNA, 23 bp, Artificial Sequence
  human ApoB siRNA sequence
aatgatgaatctactgagggcaa

SEQ ID NO: 3503 - DNA, 23 bp, Artificial Sequence
  human ApoB siRNA sequence
atgatgaatctactgagggcaaa

SEQ ID NO: 3504 - DNA, 23 bp, Artificial Sequence
  human ApoB siRNA sequence
tgatgaatctactgagggcaaaa

SEQ ID NO: 3505 - DNA, 23 bp, Artificial Sequence
  human ApoB siRNA sequence
gatgaatctactgagggcaaaac

SEQ ID NO: 3506 - DNA, 23 bp, Artificial Sequence
  human ApoB siRNA sequence
atgaatctactgagggcaaaacg

SEQ ID NO: 3507 - DNA, 23 bp, Artificial Sequence
  human ApoB siRNA sequence
tgaatctactgagggcaaaacgt

SEQ ID NO: 3508 - DNA, 23 bp, Artificial Sequence
  human ApoB siRNA sequence
gaatctactgagggcaaaacgtc

SEQ ID NO: 3509 - DNA, 23 bp, Artificial Sequence
  human ApoB siRNA sequence
aatctactgagggcaaaacgtct

SEQ ID NO: 3510 - DNA, 23 bp, Artificial Sequence
  human ApoB siRNA sequence
atctactgagggcaaaacgtctt

SEQ ID NO: 3511 - DNA, 23 bp, Artificial Sequence
  human ApoB siRNA sequence
tctactgagggcaaaacgtctta

SEQ ID NO: 3512 - DNA, 23 bp, Artificial Sequence
  human ApoB siRNA sequence
ctactgagggcaaaacgtcttac

SEQ ID NO: 3513 - DNA, 23 bp, Artificial Sequence
  human ApoB siRNA sequence
tactgagggcaaaacgtcttaca

SEQ ID NO: 3514 - DNA, 23 bp, Artificial Sequence
  human ApoB siRNA sequence
actgagggcaaaacgtcttacag

SEQ ID NO: 3515 - DNA, 23 bp, Artificial Sequence
  human ApoB siRNA sequence
ctgagggcaaaacgtcttacaga

SEQ ID NO: 3516 - DNA, 23 bp, Artificial Sequence
  human ApoB siRNA sequence
tgagggcaaaacgtcttacagac

SEQ ID NO: 3517 - DNA, 23 bp, Artificial Sequence
  human ApoB siRNA sequence
gagggcaaaacgtcttacagact

SEQ ID NO: 3518 - DNA, 23 bp, Artificial Sequence
  human ApoB siRNA sequence
agggcaaaacgtcttacagactc

SEQ ID NO: 3519 - DNA, 23 bp, Artificial Sequence
  human ApoB siRNA sequence
gggcaaaacgtcttacagactca

SEQ ID NO: 3520 - DNA, 23 bp, Artificial Sequence
  human ApoB siRNA sequence
ggcaaaacgtcttacagactcac

SEQ ID NO: 3521 - DNA, 23 bp, Artificial Sequence
  human ApoB siRNA sequence
gcaaaacgtcttacagactcacc

SEQ ID NO: 3522 - DNA, 23 bp, Artificial Sequence
  human ApoB siRNA sequence
caaaacgtcttacagactcaccc

SEQ ID NO: 3523 - DNA, 23 bp, Artificial Sequence
  human ApoB siRNA sequence
aaaacgtcttacagactcaccct

SEQ ID NO: 3524 - DNA, 23 bp, Artificial Sequence
  human ApoB siRNA sequence
aaacgtcttacagactcaccctg

SEQ ID NO: 3525 - DNA, 23 bp, Artificial Sequence
  human ApoB siRNA sequence
aacgtcttacagactcaccctgg

SEQ ID NO: 3526 - DNA, 23 bp, Artificial Sequence
  human ApoB siRNA sequence
acgtcttacagactcaccctgga

SEQ ID NO: 3527 - DNA, 23 bp, Artificial Sequence
  human ApoB siRNA sequence
cgtcttacagactcaccctggac

SEQ ID NO: 3528 - DNA, 23 bp, Artificial Sequence
  human ApoB siRNA sequence
gtcttacagactcaccctggaca

SEQ ID NO: 3529 - DNA, 23 bp, Artificial Sequence
  human ApoB siRNA sequence
tcttacagactcaccctggacat

SEQ ID NO: 3530 - DNA, 23 bp, Artificial Sequence
  human ApoB siRNA sequence
cttacagactcaccctggacatt

SEQ ID NO: 3531 - DNA, 23 bp, Artificial Sequence
  human ApoB siRNA sequence
ttacagactcaccctggacattc

SEQ ID NO: 3532 - DNA, 23 bp, Artificial Sequence
  human ApoB siRNA sequence
tacagactcaccctggacattca

SEQ ID NO: 3533 - DNA, 23 bp, Artificial Sequence
  human ApoB siRNA sequence
acagactcaccctggacattcag

SEQ ID NO: 3534 - DNA, 23 bp, Artificial Sequence
  human ApoB siRNA sequence
cagactcaccctggacattcaga

SEQ ID NO: 3535 - DNA, 23 bp, Artificial Sequence
  human ApoB siRNA sequence
agactcaccctggacattcagaa

SEQ ID NO: 3536 - DNA, 23 bp, Artificial Sequence
  human ApoB siRNA sequence
gactcaccctggacattcagaac

SEQ ID NO: 3537 - DNA, 23 bp, Artificial Sequence
  human ApoB siRNA sequence
actcaccctggacattcagaaca

SEQ ID NO: 3538 - DNA, 23 bp, Artificial Sequence
  human ApoB siRNA sequence
ctcaccctggacattcagaacaa

SEQ ID NO: 3539 - DNA, 23 bp, Artificial Sequence
  human ApoB siRNA sequence
tcaccctggacattcagaacaag

SEQ ID NO: 3540 - DNA, 23 bp, Artificial Sequence
  human ApoB siRNA sequence
caccctggacattcagaacaaga

SEQ ID NO: 3541 - DNA, 23 bp, Artificial Sequence
  human ApoB siRNA sequence
accctggacattcagaacaagaa

SEQ ID NO: 3542 - DNA, 23 bp, Artificial Sequence
  human ApoB siRNA sequence
ccctggacattcagaacaagaaa

SEQ ID NO: 3543 - DNA, 23 bp, Artificial Sequence
  human ApoB siRNA sequence
cctggacattcagaacaagaaaa

SEQ ID NO: 3544 - DNA, 23 bp, Artificial Sequence
  human ApoB siRNA sequence
ctggacattcagaacaagaaaat

SEQ ID NO: 3545 - DNA, 23 bp, Artificial Sequence
  human ApoB siRNA sequence
tggacattcagaacaagaaaatt

SEQ ID NO: 3546 - DNA, 23 bp, Artificial Sequence
  human ApoB siRNA sequence
ggacattcagaacaagaaaatta

SEQ ID NO: 3547 - DNA, 23 bp, Artificial Sequence
  human ApoB siRNA sequence
gacattcagaacaagaaaattac

SEQ ID NO: 3548 - DNA, 23 bp, Artificial Sequence
  human ApoB siRNA sequence
acattcagaacaagaaaattact

SEQ ID NO: 3549 - DNA, 23 bp, Artificial Sequence
  human ApoB siRNA sequence
cattcagaacaagaaaattactg

SEQ ID NO: 3550 - DNA, 23 bp, Artificial Sequence
  human ApoB siRNA sequence
attcagaacaagaaaattactga

SEQ ID NO: 3551 - DNA, 23 bp, Artificial Sequence
  human ApoB siRNA sequence
ttcagaacaagaaaattactgag

SEQ ID NO: 3552 - DNA, 23 bp, Artificial Sequence
  human ApoB siRNA sequence
tcagaacaagaaaattactgagg

SEQ ID NO: 3553 - DNA, 23 bp, Artificial Sequence
  human ApoB siRNA sequence
cagaacaagaaaattactgaggt

SEQ ID NO: 3554 - DNA, 23 bp, Artificial Sequence
  human ApoB siRNA sequence
agaacaagaaaattactgaggtc

SEQ ID NO: 3555 - DNA, 23 bp, Artificial Sequence
  human ApoB siRNA sequence
gaacaagaaaattactgaggtcg

SEQ ID NO: 3556 - DNA, 23 bp, Artificial Sequence
  human ApoB siRNA sequence
aacaagaaaattactgaggtcgc

SEQ ID NO: 3557 - DNA, 23 bp, Artificial Sequence
  human ApoB siRNA sequence
acaagaaaattactgaggtcgcc

SEQ ID NO: 3558 - DNA, 23 bp, Artificial Sequence
  human ApoB siRNA sequence
caagaaaattactgaggtcgccc

SEQ ID NO: 3559 - DNA, 23 bp, Artificial Sequence
  human ApoB siRNA sequence
aagaaaattactgaggtcgccct

SEQ ID NO: 3560 - DNA, 23 bp, Artificial Sequence
  human ApoB siRNA sequence
agaaaattactgaggtcgccctc

SEQ ID NO: 3561 - DNA, 23 bp, Artificial Sequence
  human ApoB siRNA sequence
gaaaattactgaggtcgccctca

SEQ ID NO: 3562 - DNA, 23 bp, Artificial Sequence
  human ApoB siRNA sequence
aaaattactgaggtcgccctcat

SEQ ID NO: 3563 - DNA, 23 bp, Artificial Sequence
  human ApoB siRNA sequence
aaattactgaggtcgccctcatg

SEQ ID NO: 3564 - DNA, 23 bp, Artificial Sequence
  human ApoB siRNA sequence
aattactgaggtcgccctcatgg

SEQ ID NO: 3565 - DNA, 23 bp, Artificial Sequence
  human ApoB siRNA sequence
attactgaggtcgccctcatggg

SEQ ID NO: 3566 - DNA, 23 bp, Artificial Sequence
  human ApoB siRNA sequence
ttactgaggtcgccctcatgggc

SEQ ID NO: 3567 - DNA, 23 bp, Artificial Sequence
  human ApoB siRNA sequence
tactgaggtcgccctcatgggcc

SEQ ID NO: 3568 - DNA, 23 bp, Artificial Sequence
  human ApoB siRNA sequence
actgaggtcgccctcatgggcca

SEQ ID NO: 3569 - DNA, 23 bp, Artificial Sequence
  human ApoB siRNA sequence
ctgaggtcgccctcatgggccac

SEQ ID NO: 3570 - DNA, 23 bp, Artificial Sequence
  human ApoB siRNA sequence
tgaggtcgccctcatgggccacc

SEQ ID NO: 3571 - DNA, 23 bp, Artificial Sequence
  human ApoB siRNA sequence
gaggtcgccctcatgggccacct

SEQ ID NO: 3572 - DNA, 23 bp, Artificial Sequence
  human ApoB siRNA sequence
aggtcgccctcatgggccaccta

SEQ ID NO: 3573 - DNA, 23 bp, Artificial Sequence
  human ApoB siRNA sequence
ggtcgccctcatgggccacctaa

SEQ ID NO: 3574 - DNA, 23 bp, Artificial Sequence
  human ApoB siRNA sequence
gtcgccctcatgggccacctaag

SEQ ID NO: 3575 - DNA, 23 bp, Artificial Sequence
  human ApoB siRNA sequence
tcgccctcatgggccacctaagt

SEQ ID NO: 3576 - DNA, 23 bp, Artificial Sequence
  human ApoB siRNA sequence
cgccctcatgggccacctaagtt

SEQ ID NO: 3577 - DNA, 23 bp, Artificial Sequence
  human ApoB siRNA sequence
gccctcatgggccacctaagttg

SEQ ID NO: 3578 - DNA, 23 bp, Artificial Sequence
  human ApoB siRNA sequence
ccctcatgggccacctaagttgt

SEQ ID NO: 3579 - DNA, 23 bp, Artificial Sequence
  human ApoB siRNA sequence
cctcatgggccacctaagttgtg

SEQ ID NO: 3580 - DNA, 23 bp, Artificial Sequence
  human ApoB siRNA sequence
ctcatgggccacctaagttgtga

SEQ ID NO: 3581 - DNA, 23 bp, Artificial Sequence
  human ApoB siRNA sequence
tcatgggccacctaagttgtgac

SEQ ID NO: 3582 - DNA, 23 bp, Artificial Sequence
  human ApoB siRNA sequence
catgggccacctaagttgtgaca

SEQ ID NO: 3583 - DNA, 23 bp, Artificial Sequence
  human ApoB siRNA sequence
atgggccacctaagttgtgacac

SEQ ID NO: 3584 - DNA, 23 bp, Artificial Sequence
  human ApoB siRNA sequence
tgggccacctaagttgtgacaca

SEQ ID NO: 3585 - DNA, 23 bp, Artificial Sequence
  human ApoB siRNA sequence
gggccacctaagttgtgacacaa

SEQ ID NO: 3586 - DNA, 23 bp, Artificial Sequence
  human ApoB siRNA sequence
ggccacctaagttgtgacacaaa

SEQ ID NO: 3587 - DNA, 23 bp, Artificial Sequence
  human ApoB siRNA sequence
gccacctaagttgtgacacaaag

SEQ ID NO: 3588 - DNA, 23 bp, Artificial Sequence
  human ApoB siRNA sequence
ccacctaagttgtgacacaaagg

SEQ ID NO: 3589 - DNA, 23 bp, Artificial Sequence
  human ApoB siRNA sequence
cacctaagttgtgacacaaagga

SEQ ID NO: 3590 - DNA, 23 bp, Artificial Sequence
  human ApoB siRNA sequence
acctaagttgtgacacaaaggaa

SEQ ID NO: 3591 - DNA, 23 bp, Artificial Sequence
  human ApoB siRNA sequence
cctaagttgtgacacaaaggaag

SEQ ID NO: 3592 - DNA, 23 bp, Artificial Sequence
  human ApoB siRNA sequence
ctaagttgtgacacaaaggaaga

SEQ ID NO: 3593 - DNA, 23 bp, Artificial Sequence
  human ApoB siRNA sequence
taagttgtgacacaaaggaagaa

SEQ ID NO: 3594 - DNA, 23 bp, Artificial Sequence
  human ApoB siRNA sequence
aagttgtgacacaaaggaagaaa

SEQ ID NO: 3595 - DNA, 23 bp, Artificial Sequence
  human ApoB siRNA sequence
agttgtgacacaaaggaagaaag

SEQ ID NO: 3596 - DNA, 23 bp, Artificial Sequence
  human ApoB siRNA sequence
gttgtgacacaaaggaagaaaga

SEQ ID NO: 3597 - DNA, 23 bp, Artificial Sequence
  human ApoB siRNA sequence
ttgtgacacaaaggaagaaagaa

SEQ ID NO: 3598 - DNA, 23 bp, Artificial Sequence
  human ApoB siRNA sequence
tgtgacacaaaggaagaaagaaa

SEQ ID NO: 3599 - DNA, 23 bp, Artificial Sequence
  human ApoB siRNA sequence
gtgacacaaaggaagaaagaaaa

SEQ ID NO: 3600 - DNA, 23 bp, Artificial Sequence
  human ApoB siRNA sequence
tgacacaaaggaagaaagaaaaa

SEQ ID NO: 3601 - DNA, 23 bp, Artificial Sequence
  human ApoB siRNA sequence
gacacaaaggaagaaagaaaaat

SEQ ID NO: 3602 - DNA, 23 bp, Artificial Sequence
  human ApoB siRNA sequence
acacaaaggaagaaagaaaaatc

SEQ ID NO: 3603 - DNA, 23 bp, Artificial Sequence
  human ApoB siRNA sequence
cacaaaggaagaaagaaaaatca

SEQ ID NO: 3604 - DNA, 23 bp, Artificial Sequence
  human ApoB siRNA sequence
acaaaggaagaaagaaaaatcaa

SEQ ID NO: 3605 - DNA, 23 bp, Artificial Sequence
  human ApoB siRNA sequence
caaaggaagaaagaaaaatcaag

SEQ ID NO: 3606 - DNA, 23 bp, Artificial Sequence
  human ApoB siRNA sequence
aaaggaagaaagaaaaatcaagg

SEQ ID NO: 3607 - DNA, 23 bp, Artificial Sequence
  human ApoB siRNA sequence
aaggaagaaagaaaaatcaaggg

SEQ ID NO: 3608 - DNA, 23 bp, Artificial Sequence
  human ApoB siRNA sequence
aggaagaaagaaaaatcaagggt

SEQ ID NO: 3609 - DNA, 23 bp, Artificial Sequence
  human ApoB siRNA sequence
ggaagaaagaaaaatcaagggtg

SEQ ID NO: 3610 - DNA, 23 bp, Artificial Sequence
  human ApoB siRNA sequence
gaagaaagaaaaatcaagggtgt

SEQ ID NO: 3611 - DNA, 23 bp, Artificial Sequence
  human ApoB siRNA sequence
aagaaagaaaaatcaagggtgtt

SEQ ID NO: 3612 - DNA, 23 bp, Artificial Sequence
  human ApoB siRNA sequence
agaaagaaaaatcaagggtgtta

SEQ ID NO: 3613 - DNA, 23 bp, Artificial Sequence
  human ApoB siRNA sequence
gaaagaaaaatcaagggtgttat

SEQ ID NO: 3614 - DNA, 23 bp, Artificial Sequence
  human ApoB siRNA sequence
aaagaaaaatcaagggtgttatt

SEQ ID NO: 3615 - DNA, 23 bp, Artificial Sequence
  human ApoB siRNA sequence
aagaaaaatcaagggtgttattt

SEQ ID NO: 3616 - DNA, 23 bp, Artificial Sequence
  human ApoB siRNA sequence
agaaaaatcaagggtgttatttc

SEQ ID NO: 3617 - DNA, 23 bp, Artificial Sequence
  human ApoB siRNA sequence
gaaaaatcaagggtgttatttcc

SEQ ID NO: 3618 - DNA, 23 bp, Artificial Sequence
  human ApoB siRNA sequence
aaaaatcaagggtgttatttcca

SEQ ID NO: 3619 - DNA, 23 bp, Artificial Sequence
  human ApoB siRNA sequence
aaaatcaagggtgttatttccat

SEQ ID NO: 3620 - DNA, 23 bp, Artificial Sequence
  human ApoB siRNA sequence
aaatcaagggtgttatttccata

SEQ ID NO: 3621 - DNA, 23 bp, Artificial Sequence
  human ApoB siRNA sequence
aatcaagggtgttatttccatac

SEQ ID NO: 3622 - DNA, 23 bp, Artificial Sequence
  human ApoB siRNA sequence
atcaagggtgttatttccatacc

SEQ ID NO: 3623 - DNA, 23 bp, Artificial Sequence
  human ApoB siRNA sequence
tcaagggtgttatttccataccc

SEQ ID NO: 3624 - DNA, 23 bp, Artificial Sequence
  human ApoB siRNA sequence
caagggtgttatttccatacccc

SEQ ID NO: 3625 - DNA, 23 bp, Artificial Sequence
  human ApoB siRNA sequence
aagggtgttatttccataccccg

SEQ ID NO: 3626 - DNA, 23 bp, Artificial Sequence
  human ApoB siRNA sequence
agggtgttatttccataccccgt

SEQ ID NO: 3627 - DNA, 23 bp, Artificial Sequence
  human ApoB siRNA sequence
gggtgttatttccataccccgtt

SEQ ID NO: 3628 - DNA, 23 bp, Artificial Sequence
  human ApoB siRNA sequence
ggtgttatttccataccccgttt

SEQ ID NO: 3629 - DNA, 23 bp, Artificial Sequence
  human ApoB siRNA sequence
gtgttatttccataccccgtttg

SEQ ID NO: 3630 - DNA, 23 bp, Artificial Sequence
  human ApoB siRNA sequence
tgttatttccataccccgtttgc

SEQ ID NO: 3631 - DNA, 23 bp, Artificial Sequence
  human ApoB siRNA sequence
gttatttccataccccgtttgca

SEQ ID NO: 3632 - DNA, 23 bp, Artificial Sequence
  human ApoB siRNA sequence
ttatttccataccccgtttgcaa

SEQ ID NO: 3633 - DNA, 23 bp, Artificial Sequence
  human ApoB siRNA sequence
tatttccataccccgtttgcaag

SEQ ID NO: 3634 - DNA, 23 bp, Artificial Sequence
  human ApoB siRNA sequence
atttccataccccgtttgcaagc

SEQ ID NO: 3635 - DNA, 23 bp, Artificial Sequence
  human ApoB siRNA sequence
tttccataccccgtttgcaagca

SEQ ID NO: 3636 - DNA, 23 bp, Artificial Sequence
  human ApoB siRNA sequence
ttccataccccgtttgcaagcag

SEQ ID NO: 3637 - DNA, 23 bp, Artificial Sequence
  human ApoB siRNA sequence
tccataccccgtttgcaagcaga

SEQ ID NO: 3638 - DNA, 23 bp, Artificial Sequence
  human ApoB siRNA sequence
ccataccccgtttgcaagcagaa

SEQ ID NO: 3639 - DNA, 23 bp, Artificial Sequence
  human ApoB siRNA sequence
cataccccgtttgcaagcagaag

SEQ ID NO: 3640 - DNA, 23 bp, Artificial Sequence
  human ApoB siRNA sequence
ataccccgtttgcaagcagaagc

SEQ ID NO: 3641 - DNA, 23 bp, Artificial Sequence
  human ApoB siRNA sequence
taccccgtttgcaagcagaagcc

SEQ ID NO: 3642 - DNA, 23 bp, Artificial Sequence
  human ApoB siRNA sequence
accccgtttgcaagcagaagcca

SEQ ID NO: 3643 - DNA, 23 bp, Artificial Sequence
  human ApoB siRNA sequence
ccccgtttgcaagcagaagccag

SEQ ID NO: 3644 - DNA, 23 bp, Artificial Sequence
  human ApoB siRNA sequence
cccgtttgcaagcagaagccaga

SEQ ID NO: 3645 - DNA, 23 bp, Artificial Sequence
  human ApoB siRNA sequence
ccgtttgcaagcagaagccagaa

SEQ ID NO: 3646 - DNA, 23 bp, Artificial Sequence
  human ApoB siRNA sequence
cgtttgcaagcagaagccagaag

SEQ ID NO: 3647 - DNA, 23 bp, Artificial Sequence
  human ApoB siRNA sequence
gtttgcaagcagaagccagaagt

SEQ ID NO: 3648 - DNA, 23 bp, Artificial Sequence
  human ApoB siRNA sequence
tttgcaagcagaagccagaagtg

SEQ ID NO: 3649 - DNA, 23 bp, Artificial Sequence
  human ApoB siRNA sequence
ttgcaagcagaagccagaagtga

SEQ ID NO: 3650 - DNA, 23 bp, Artificial Sequence
  human ApoB siRNA sequence
tgcaagcagaagccagaagtgag

SEQ ID NO: 3651 - DNA, 23 bp, Artificial Sequence
  human ApoB siRNA sequence
gcaagcagaagccagaagtgaga

SEQ ID NO: 3652 - DNA, 23 bp, Artificial Sequence
  human ApoB siRNA sequence
caagcagaagccagaagtgagat

SEQ ID NO: 3653 - DNA, 23 bp, Artificial Sequence
  human ApoB siRNA sequence
aagcagaagccagaagtgagatc

SEQ ID NO: 3654 - DNA, 23 bp, Artificial Sequence
  human ApoB siRNA sequence
agcagaagccagaagtgagatcc

SEQ ID NO: 3655 - DNA, 23 bp, Artificial Sequence
  human ApoB siRNA sequence
gcagaagccagaagtgagatcct

SEQ ID NO: 3656 - DNA, 23 bp, Artificial Sequence
  human ApoB siRNA sequence
cagaagccagaagtgagatcctc

SEQ ID NO: 3657 - DNA, 23 bp, Artificial Sequence
  human ApoB siRNA sequence
agaagccagaagtgagatcctcg

SEQ ID NO: 3658 - DNA, 23 bp, Artificial Sequence
  human ApoB siRNA sequence
gaagccagaagtgagatcctcgc

SEQ ID NO: 3659 - DNA, 23 bp, Artificial Sequence
  human ApoB siRNA sequence
aagccagaagtgagatcctcgcc

SEQ ID NO: 3660 - DNA, 23 bp, Artificial Sequence
  human ApoB siRNA sequence
agccagaagtgagatcctcgccc

SEQ ID NO: 3661 - DNA, 23 bp, Artificial Sequence
  human ApoB siRNA sequence
gccagaagtgagatcctcgccca

SEQ ID NO: 3662 - DNA, 23 bp, Artificial Sequence
  human ApoB siRNA sequence
ccagaagtgagatcctcgcccac

SEQ ID NO: 3663 - DNA, 23 bp, Artificial Sequence
  human ApoB siRNA sequence
cagaagtgagatcctcgcccact

SEQ ID NO: 3664 - DNA, 23 bp, Artificial Sequence
  human ApoB siRNA sequence
agaagtgagatcctcgcccactg

SEQ ID NO: 3665 - DNA, 23 bp, Artificial Sequence
  human ApoB siRNA sequence
gaagtgagatcctcgcccactgg

SEQ ID NO: 3666 - DNA, 23 bp, Artificial Sequence
  human ApoB siRNA sequence
aagtgagatcctcgcccactggt

SEQ ID NO: 3667 - DNA, 23 bp, Artificial Sequence
  human ApoB siRNA sequence
agtgagatcctcgcccactggtc

SEQ ID NO: 3668 - DNA, 23 bp, Artificial Sequence
  human ApoB siRNA sequence
gtgagatcctcgcccactggtcg

SEQ ID NO: 3669 - DNA, 23 bp, Artificial Sequence
  human ApoB siRNA sequence
tgagatcctcgcccactggtcgc

SEQ ID NO: 3670 - DNA, 23 bp, Artificial Sequence
  human ApoB siRNA sequence
gagatcctcgcccactggtcgcc

SEQ ID NO: 3671 - DNA, 23 bp, Artificial Sequence
  human ApoB siRNA sequence
agatcctcgcccactggtcgcct

SEQ ID NO: 3672 - DNA, 23 bp, Artificial Sequence
  human ApoB siRNA sequence
gatcctcgcccactggtcgcctg

SEQ ID NO: 3673 - DNA, 23 bp, Artificial Sequence
  human ApoB siRNA sequence
atcctcgcccactggtcgcctgc

SEQ ID NO: 3674 - DNA, 23 bp, Artificial Sequence
  human ApoB siRNA sequence
tcctcgcccactggtcgcctgcc

SEQ ID NO: 3675 - DNA, 23 bp, Artificial Sequence
  human ApoB siRNA sequence
cctcgcccactggtcgcctgcca

SEQ ID NO: 3676 - DNA, 23 bp, Artificial Sequence
  human ApoB siRNA sequence
ctcgcccactggtcgcctgccaa

SEQ ID NO: 3677 - DNA, 23 bp, Artificial Sequence
  human ApoB siRNA sequence
tcgcccactggtcgcctgccaaa

SEQ ID NO: 3678 - DNA, 23 bp, Artificial Sequence
  human ApoB siRNA sequence
cgcccactggtcgcctgccaaac

SEQ ID NO: 3679 - DNA, 23 bp, Artificial Sequence
  human ApoB siRNA sequence
gcccactggtcgcctgccaaact

SEQ ID NO: 3680 - DNA, 23 bp, Artificial Sequence
  human ApoB siRNA sequence
cccactggtcgcctgccaaactg

SEQ ID NO: 3681 - DNA, 23 bp, Artificial Sequence
  human ApoB siRNA sequence
ccactggtcgcctgccaaactgc

SEQ ID NO: 3682 - DNA, 23 bp, Artificial Sequence
  human ApoB siRNA sequence
cactggtcgcctgccaaactgct

SEQ ID NO: 3683 - DNA, 23 bp, Artificial Sequence
  human ApoB siRNA sequence
actggtcgcctgccaaactgctt

SEQ ID NO: 3684 - DNA, 23 bp, Artificial Sequence
  human ApoB siRNA sequence
ctggtcgcctgccaaactgcttc

SEQ ID NO: 3685 - DNA, 23 bp, Artificial Sequence
  human ApoB siRNA sequence
tggtcgcctgccaaactgcttct

SEQ ID NO: 3686 - DNA, 23 bp, Artificial Sequence
  human ApoB siRNA sequence
ggtcgcctgccaaactgcttctc

SEQ ID NO: 3687 - DNA, 23 bp, Artificial Sequence
  human ApoB siRNA sequence
gtcgcctgccaaactgcttctcc

SEQ ID NO: 3688 - DNA, 23 bp, Artificial Sequence
  human ApoB siRNA sequence
tcgcctgccaaactgcttctcca

SEQ ID NO: 3689 - DNA, 23 bp, Artificial Sequence
  human ApoB siRNA sequence
cgcctgccaaactgcttctccaa

SEQ ID NO: 3690 - DNA, 23 bp, Artificial Sequence
  human ApoB siRNA sequence
gcctgccaaactgcttctccaaa

SEQ ID NO: 3691 - DNA, 23 bp, Artificial Sequence
  human ApoB siRNA sequence
cctgccaaactgcttctccaaat

SEQ ID NO: 3692 - DNA, 23 bp, Artificial Sequence
  human ApoB siRNA sequence
ctgccaaactgcttctccaaatg

SEQ ID NO: 3693 - DNA, 23 bp, Artificial Sequence
  human ApoB siRNA sequence
tgccaaactgcttctccaaatgg

SEQ ID NO: 3694 - DNA, 23 bp, Artificial Sequence
  human ApoB siRNA sequence
gccaaactgcttctccaaatgga

SEQ ID NO: 3695 - DNA, 23 bp, Artificial Sequence
  human ApoB siRNA sequence
ccaaactgcttctccaaatggac

SEQ ID NO: 3696 - DNA, 23 bp, Artificial Sequence
  human ApoB siRNA sequence
caaactgcttctccaaatggact

SEQ ID NO: 3697 - DNA, 23 bp, Artificial Sequence
  human ApoB siRNA sequence
aaactgcttctccaaatggactc

SEQ ID NO: 3698 - DNA, 23 bp, Artificial Sequence
  human ApoB siRNA sequence
aactgcttctccaaatggactca

SEQ ID NO: 3699 - DNA, 23 bp, Artificial Sequence
  human ApoB siRNA sequence
actgcttctccaaatggactcat

SEQ ID NO: 3700 - DNA, 23 bp, Artificial Sequence
  human ApoB siRNA sequence
ctgcttctccaaatggactcatc

SEQ ID NO: 3701 - DNA, 23 bp, Artificial Sequence
  human ApoB siRNA sequence
tgcttctccaaatggactcatct

SEQ ID NO: 3702 - DNA, 23 bp, Artificial Sequence
  human ApoB siRNA sequence
gcttctccaaatggactcatctg

SEQ ID NO: 3703 - DNA, 23 bp, Artificial Sequence
  human ApoB siRNA sequence
cttctccaaatggactcatctgc

SEQ ID NO: 3704 - DNA, 23 bp, Artificial Sequence
  human ApoB siRNA sequence
ttctccaaatggactcatctgct

SEQ ID NO: 3705 - DNA, 23 bp, Artificial Sequence
  human ApoB siRNA sequence
tctccaaatggactcatctgcta

SEQ ID NO: 3706 - DNA, 23 bp, Artificial Sequence
  human ApoB siRNA sequence
ctccaaatggactcatctgctac

SEQ ID NO: 3707 - DNA, 23 bp, Artificial Sequence
  human ApoB siRNA sequence
tccaaatggactcatctgctaca

SEQ ID NO: 3708 - DNA, 23 bp, Artificial Sequence
  human ApoB siRNA sequence
ccaaatggactcatctgctacag

SEQ ID NO: 3709 - DNA, 23 bp, Artificial Sequence
  human ApoB siRNA sequence
caaatggactcatctgctacagc

SEQ ID NO: 3710 - DNA, 23 bp, Artificial Sequence
  human ApoB siRNA sequence
aaatggactcatctgctacagct

SEQ ID NO: 3711 - DNA, 23 bp, Artificial Sequence
  human ApoB siRNA sequence
aatggactcatctgctacagctt

SEQ ID NO: 3712 - DNA, 23 bp, Artificial Sequence
  human ApoB siRNA sequence
atggactcatctgctacagctta

SEQ ID NO: 3713 - DNA, 23 bp, Artificial Sequence
  human ApoB siRNA sequence
tggactcatctgctacagcttat

SEQ ID NO: 3714 - DNA, 23 bp, Artificial Sequence
  human ApoB siRNA sequence
ggactcatctgctacagcttatg

SEQ ID NO: 3715 - DNA, 23 bp, Artificial Sequence
  human ApoB siRNA sequence
gactcatctgctacagcttatgg

SEQ ID NO: 3716 - DNA, 23 bp, Artificial Sequence
  human ApoB siRNA sequence
actcatctgctacagcttatggc

SEQ ID NO: 3717 - DNA, 23 bp, Artificial Sequence
  human ApoB siRNA sequence
ctcatctgctacagcttatggct

SEQ ID NO: 3718 - DNA, 23 bp, Artificial Sequence
  human ApoB siRNA sequence
tcatctgctacagcttatggctc

SEQ ID NO: 3719 - DNA, 23 bp, Artificial Sequence
  human ApoB siRNA sequence
catctgctacagcttatggctcc

SEQ ID NO: 3720 - DNA, 23 bp, Artificial Sequence
  human ApoB siRNA sequence
atctgctacagcttatggctcca

SEQ ID NO: 3721 - DNA, 23 bp, Artificial Sequence
  human ApoB siRNA sequence
tctgctacagcttatggctccac

SEQ ID NO: 3722 - DNA, 23 bp, Artificial Sequence
  human ApoB siRNA sequence
ctgctacagcttatggctccaca

SEQ ID NO: 3723 - DNA, 23 bp, Artificial Sequence
  human ApoB siRNA sequence
tgctacagcttatggctccacag

SEQ ID NO: 3724 - DNA, 23 bp, Artificial Sequence
  human ApoB siRNA sequence
gctacagcttatggctccacagt

SEQ ID NO: 3725 - DNA, 23 bp, Artificial Sequence
  human ApoB siRNA sequence
ctacagcttatggctccacagtt

SEQ ID NO: 3726 - DNA, 23 bp, Artificial Sequence
  human ApoB siRNA sequence
tacagcttatggctccacagttt

SEQ ID NO: 3727 - DNA, 23 bp, Artificial Sequence
  human ApoB siRNA sequence
acagcttatggctccacagtttc

SEQ ID NO: 3728 - DNA, 23 bp, Artificial Sequence
  human ApoB siRNA sequence
cagcttatggctccacagtttcc

SEQ ID NO: 3729 - DNA, 23 bp, Artificial Sequence
  human ApoB siRNA sequence
agcttatggctccacagtttcca

SEQ ID NO: 3730 - DNA, 23 bp, Artificial Sequence
  human ApoB siRNA sequence
gcttatggctccacagtttccaa

SEQ ID NO: 3731 - DNA, 23 bp, Artificial Sequence
  human ApoB siRNA sequence
cttatggctccacagtttccaag

SEQ ID NO: 3732 - DNA, 23 bp, Artificial Sequence
  human ApoB siRNA sequence
ttatggctccacagtttccaaga

SEQ ID NO: 3733 - DNA, 23 bp, Artificial Sequence
  human ApoB siRNA sequence
tatggctccacagtttccaagag

SEQ ID NO: 3734 - DNA, 23 bp, Artificial Sequence
  human ApoB siRNA sequence
atggctccacagtttccaagagg

SEQ ID NO: 3735 - DNA, 23 bp, Artificial Sequence
  human ApoB siRNA sequence
tggctccacagtttccaagaggg

SEQ ID NO: 3736 - DNA, 23 bp, Artificial Sequence
  human ApoB siRNA sequence
ggctccacagtttccaagagggt

SEQ ID NO: 3737 - DNA, 23 bp, Artificial Sequence
  human ApoB siRNA sequence
gctccacagtttccaagagggtg

SEQ ID NO: 3738 - DNA, 23 bp, Artificial Sequence
  human ApoB siRNA sequence
ctccacagtttccaagagggtgg

SEQ ID NO: 3739 - DNA, 23 bp, Artificial Sequence
  human ApoB siRNA sequence
tccacagtttccaagagggtggc

SEQ ID NO: 3740 - DNA, 23 bp, Artificial Sequence
  human ApoB siRNA sequence
ccacagtttccaagagggtggca

SEQ ID NO: 3741 - DNA, 23 bp, Artificial Sequence
  human ApoB siRNA sequence
cacagtttccaagagggtggcat

SEQ ID NO: 3742 - DNA, 23 bp, Artificial Sequence
  human ApoB siRNA sequence
acagtttccaagagggtggcatg

SEQ ID NO: 3743 - DNA, 23 bp, Artificial Sequence
  human ApoB siRNA sequence
cagtttccaagagggtggcatgg

SEQ ID NO: 3744 - DNA, 23 bp, Artificial Sequence
  human ApoB siRNA sequence
agtttccaagagggtggcatggc

SEQ ID NO: 3745 - DNA, 23 bp, Artificial Sequence
  human ApoB siRNA sequence
gtttccaagagggtggcatggca

SEQ ID NO: 3746 - DNA, 23 bp, Artificial Sequence
  human ApoB siRNA sequence
tttccaagagggtggcatggcat

SEQ ID NO: 3747 - DNA, 23 bp, Artificial Sequence
  human ApoB siRNA sequence
ttccaagagggtggcatggcatt

SEQ ID NO: 3748 - DNA, 23 bp, Artificial Sequence
  human ApoB siRNA sequence
tccaagagggtggcatggcatta

SEQ ID NO: 3749 - DNA, 23 bp, Artificial Sequence
  human ApoB siRNA sequence
ccaagagggtggcatggcattat

SEQ ID NO: 3750 - DNA, 23 bp, Artificial Sequence
  human ApoB siRNA sequence
caagagggtggcatggcattatg

SEQ ID NO: 3751 - DNA, 23 bp, Artificial Sequence
  human ApoB siRNA sequence
aagagggtggcatggcattatga

SEQ ID NO: 3752 - DNA, 23 bp, Artificial Sequence
  human ApoB siRNA sequence
agagggtggcatggcattatgat

SEQ ID NO: 3753 - DNA, 23 bp, Artificial Sequence
  human ApoB siRNA sequence
gagggtggcatggcattatgatg

SEQ ID NO: 3754 - DNA, 23 bp, Artificial Sequence
  human ApoB siRNA sequence
agggtggcatggcattatgatga

SEQ ID NO: 3755 - DNA, 23 bp, Artificial Sequence
  human ApoB siRNA sequence
gggtggcatggcattatgatgaa

SEQ ID NO: 3756 - DNA, 23 bp, Artificial Sequence
  human ApoB siRNA sequence
ggtggcatggcattatgatgaag

SEQ ID NO: 3757 - DNA, 23 bp, Artificial Sequence
  human ApoB siRNA sequence
gtggcatggcattatgatgaaga

SEQ ID NO: 3758 - DNA, 23 bp, Artificial Sequence
  human ApoB siRNA sequence
tggcatggcattatgatgaagag

SEQ ID NO: 3759 - DNA, 23 bp, Artificial Sequence
  human ApoB siRNA sequence
ggcatggcattatgatgaagaga

SEQ ID NO: 3760 - DNA, 23 bp, Artificial Sequence
  human ApoB siRNA sequence
gcatggcattatgatgaagagaa

SEQ ID NO: 3761 - DNA, 23 bp, Artificial Sequence
  human ApoB siRNA sequence
catggcattatgatgaagagaag

SEQ ID NO: 3762 - DNA, 23 bp, Artificial Sequence
  human ApoB siRNA sequence
atggcattatgatgaagagaaga

SEQ ID NO: 3763 - DNA, 23 bp, Artificial Sequence
  human ApoB siRNA sequence
tggcattatgatgaagagaagat

SEQ ID NO: 3764 - DNA, 23 bp, Artificial Sequence
  human ApoB siRNA sequence
ggcattatgatgaagagaagatt

SEQ ID NO: 3765 - DNA, 23 bp, Artificial Sequence
  human ApoB siRNA sequence
gcattatgatgaagagaagattg

SEQ ID NO: 3766 - DNA, 23 bp, Artificial Sequence
  human ApoB siRNA sequence
cattatgatgaagagaagattga

SEQ ID NO: 3767 - DNA, 23 bp, Artificial Sequence
  human ApoB siRNA sequence
attatgatgaagagaagattgaa

SEQ ID NO: 3768 - DNA, 23 bp, Artificial Sequence
  human ApoB siRNA sequence
ttatgatgaagagaagattgaat

SEQ ID NO: 3769 - DNA, 23 bp, Artificial Sequence
  human ApoB siRNA sequence
tatgatgaagagaagattgaatt

SEQ ID NO: 3770 - DNA, 23 bp, Artificial Sequence
  human ApoB siRNA sequence
atgatgaagagaagattgaattt

SEQ ID NO: 3771 - DNA, 23 bp, Artificial Sequence
  human ApoB siRNA sequence
tgatgaagagaagattgaatttg

SEQ ID NO: 3772 - DNA, 23 bp, Artificial Sequence
  human ApoB siRNA sequence
gatgaagagaagattgaatttga

SEQ ID NO: 3773 - DNA, 23 bp, Artificial Sequence
  human ApoB siRNA sequence
atgaagagaagattgaatttgaa

SEQ ID NO: 3774 - DNA, 23 bp, Artificial Sequence
  human ApoB siRNA sequence
tgaagagaagattgaatttgaat

SEQ ID NO: 3775 - DNA, 23 bp, Artificial Sequence
  human ApoB siRNA sequence
gaagagaagattgaatttgaatg

SEQ ID NO: 3776 - DNA, 23 bp, Artificial Sequence
  human ApoB siRNA sequence
aagagaagattgaatttgaatgg

SEQ ID NO: 3777 - DNA, 23 bp, Artificial Sequence
  human ApoB siRNA sequence
agagaagattgaatttgaatgga

SEQ ID NO: 3778 - DNA, 23 bp, Artificial Sequence
  human ApoB siRNA sequence
gagaagattgaatttgaatggaa

SEQ ID NO: 3779 - DNA, 23 bp, Artificial Sequence
  human ApoB siRNA sequence
agaagattgaatttgaatggaac

SEQ ID NO: 3780 - DNA, 23 bp, Artificial Sequence
  human ApoB siRNA sequence
gaagattgaatttgaatggaaca

SEQ ID NO: 3781 - DNA, 23 bp, Artificial Sequence
  human ApoB siRNA sequence
aagattgaatttgaatggaacac

SEQ ID NO: 3782 - DNA, 23 bp, Artificial Sequence
  human ApoB siRNA sequence
agattgaatttgaatggaacaca

SEQ ID NO: 3783 - DNA, 23 bp, Artificial Sequence
  human ApoB siRNA sequence
gattgaatttgaatggaacacag

SEQ ID NO: 3784 - DNA, 23 bp, Artificial Sequence
  human ApoB siRNA sequence
attgaatttgaatggaacacagg

SEQ ID NO: 3785 - DNA, 23 bp, Artificial Sequence
  human ApoB siRNA sequence
ttgaatttgaatggaacacaggc

SEQ ID NO: 3786 - DNA, 23 bp, Artificial Sequence
  human ApoB siRNA sequence
tgaatttgaatggaacacaggca

SEQ ID NO: 3787 - DNA, 23 bp, Artificial Sequence
  human ApoB siRNA sequence
gaatttgaatggaacacaggcac

SEQ ID NO: 3788 - DNA, 23 bp, Artificial Sequence
  human ApoB siRNA sequence
aatttgaatggaacacaggcacc

SEQ ID NO: 3789 - DNA, 23 bp, Artificial Sequence
  human ApoB siRNA sequence
atttgaatggaacacaggcacca

SEQ ID NO: 3790 - DNA, 23 bp, Artificial Sequence
  human ApoB siRNA sequence
tttgaatggaacacaggcaccaa

SEQ ID NO: 3791 - DNA, 23 bp, Artificial Sequence
  human ApoB siRNA sequence
ttgaatggaacacaggcaccaat

SEQ ID NO: 3792 - DNA, 23 bp, Artificial Sequence
  human ApoB siRNA sequence
tgaatggaacacaggcaccaatg

SEQ ID NO: 3793 - DNA, 23 bp, Artificial Sequence
  human ApoB siRNA sequence
gaatggaacacaggcaccaatgt

SEQ ID NO: 3794 - DNA, 23 bp, Artificial Sequence
  human ApoB siRNA sequence
aatggaacacaggcaccaatgta

SEQ ID NO: 3795 - DNA, 23 bp, Artificial Sequence
  human ApoB siRNA sequence
atggaacacaggcaccaatgtag

SEQ ID NO: 3796 - DNA, 23 bp, Artificial Sequence
  human ApoB siRNA sequence
tggaacacaggcaccaatgtaga

SEQ ID NO: 3797 - DNA, 23 bp, Artificial Sequence
  human ApoB siRNA sequence
ggaacacaggcaccaatgtagat

SEQ ID NO: 3798 - DNA, 23 bp, Artificial Sequence
  human ApoB siRNA sequence
gaacacaggcaccaatgtagata

SEQ ID NO: 3799 - DNA, 23 bp, Artificial Sequence
  human ApoB siRNA sequence
aacacaggcaccaatgtagatac

SEQ ID NO: 3800 - DNA, 23 bp, Artificial Sequence
  human ApoB siRNA sequence
acacaggcaccaatgtagatacc

SEQ ID NO: 3801 - DNA, 23 bp, Artificial Sequence
  human ApoB siRNA sequence
cacaggcaccaatgtagatacca

SEQ ID NO: 3802 - DNA, 23 bp, Artificial Sequence
  human ApoB siRNA sequence
acaggcaccaatgtagataccaa

SEQ ID NO: 3803 - DNA, 23 bp, Artificial Sequence
  human ApoB siRNA sequence
caggcaccaatgtagataccaaa

SEQ ID NO: 3804 - DNA, 23 bp, Artificial Sequence
  human ApoB siRNA sequence
aggcaccaatgtagataccaaaa

SEQ ID NO: 3805 - DNA, 23 bp, Artificial Sequence
  human ApoB siRNA sequence
ggcaccaatgtagataccaaaaa

SEQ ID NO: 3806 - DNA, 23 bp, Artificial Sequence
  human ApoB siRNA sequence
gcaccaatgtagataccaaaaaa

SEQ ID NO: 3807 - DNA, 23 bp, Artificial Sequence
  human ApoB siRNA sequence
caccaatgtagataccaaaaaaa

SEQ ID NO: 3808 - DNA, 23 bp, Artificial Sequence
  human ApoB siRNA sequence
accaatgtagataccaaaaaaat

SEQ ID NO: 3809 - DNA, 23 bp, Artificial Sequence
  human ApoB siRNA sequence
ccaatgtagataccaaaaaaatg

SEQ ID NO: 3810 - DNA, 23 bp, Artificial Sequence
  human ApoB siRNA sequence
caatgtagataccaaaaaaatga

SEQ ID NO: 3811 - DNA, 23 bp, Artificial Sequence
  human ApoB siRNA sequence
aatgtagataccaaaaaaatgac

SEQ ID NO: 3812 - DNA, 23 bp, Artificial Sequence
  human ApoB siRNA sequence
atgtagataccaaaaaaatgact

SEQ ID NO: 3813 - DNA, 23 bp, Artificial Sequence
  human ApoB siRNA sequence
tgtagataccaaaaaaatgactt

SEQ ID NO: 3814 - DNA, 23 bp, Artificial Sequence
  human ApoB siRNA sequence
gtagataccaaaaaaatgacttc

SEQ ID NO: 3815 - DNA, 23 bp, Artificial Sequence
  human ApoB siRNA sequence
tagataccaaaaaaatgacttcc

SEQ ID NO: 3816 - DNA, 23 bp, Artificial Sequence
  human ApoB siRNA sequence
agataccaaaaaaatgacttcca

SEQ ID NO: 3817 - DNA, 23 bp, Artificial Sequence
  human ApoB siRNA sequence
gataccaaaaaaatgacttccaa

SEQ ID NO: 3818 - DNA, 23 bp, Artificial Sequence
  human ApoB siRNA sequence
ataccaaaaaaatgacttccaat

SEQ ID NO: 3819 - DNA, 23 bp, Artificial Sequence
  human ApoB siRNA sequence
taccaaaaaaatgacttccaatt

SEQ ID NO: 3820 - DNA, 23 bp, Artificial Sequence
  human ApoB siRNA sequence
accaaaaaaatgacttccaattt

SEQ ID NO: 3821 - DNA, 23 bp, Artificial Sequence
  human ApoB siRNA sequence
ccaaaaaaatgacttccaatttc

SEQ ID NO: 3822 - DNA, 23 bp, Artificial Sequence
  human ApoB siRNA sequence
caaaaaaatgacttccaatttcc

SEQ ID NO: 3823 - DNA, 23 bp, Artificial Sequence
  human ApoB siRNA sequence
aaaaaaatgacttccaatttccc

SEQ ID NO: 3824 - DNA, 23 bp, Artificial Sequence
  human ApoB siRNA sequence
aaaaaatgacttccaatttccct

SEQ ID NO: 3825 - DNA, 23 bp, Artificial Sequence
  human ApoB siRNA sequence
aaaaatgacttccaatttccctg

SEQ ID NO: 3826 - DNA, 23 bp, Artificial Sequence
  human ApoB siRNA sequence
aaaatgacttccaatttccctgt

SEQ ID NO: 3827 - DNA, 23 bp, Artificial Sequence
  human ApoB siRNA sequence
aaatgacttccaatttccctgtg

SEQ ID NO: 3828 - DNA, 23 bp, Artificial Sequence
  human ApoB siRNA sequence
aatgacttccaatttccctgtgg

SEQ ID NO: 3829 - DNA, 23 bp, Artificial Sequence
  human ApoB siRNA sequence
atgacttccaatttccctgtgga

SEQ ID NO: 3830 - DNA, 23 bp, Artificial Sequence
  human ApoB siRNA sequence
tgacttccaatttccctgtggat

SEQ ID NO: 3831 - DNA, 23 bp, Artificial Sequence
  human ApoB siRNA sequence
gacttccaatttccctgtggatc

SEQ ID NO: 3832 - DNA, 23 bp, Artificial Sequence
  human ApoB siRNA sequence
acttccaatttccctgtggatct

SEQ ID NO: 3833 - DNA, 23 bp, Artificial Sequence
  human ApoB siRNA sequence
cttccaatttccctgtggatctc

SEQ ID NO: 3834 - DNA, 23 bp, Artificial Sequence
  human ApoB siRNA sequence
ttccaatttccctgtggatctct

SEQ ID NO: 3835 - DNA, 23 bp, Artificial Sequence
  human ApoB siRNA sequence
tccaatttccctgtggatctctc

SEQ ID NO: 3836 - DNA, 23 bp, Artificial Sequence
  human ApoB siRNA sequence
ccaatttccctgtggatctctcc

SEQ ID NO: 3837 - DNA, 23 bp, Artificial Sequence
  human ApoB siRNA sequence
caatttccctgtggatctctccg

SEQ ID NO: 3838 - DNA, 23 bp, Artificial Sequence
  human ApoB siRNA sequence
aatttccctgtggatctctccga

SEQ ID NO: 3839 - DNA, 23 bp, Artificial Sequence
  human ApoB siRNA sequence
atttccctgtggatctctccgat

SEQ ID NO: 3840 - DNA, 23 bp, Artificial Sequence
  human ApoB siRNA sequence
tttccctgtggatctctccgatt

SEQ ID NO: 3841 - DNA, 23 bp, Artificial Sequence
  human ApoB siRNA sequence
ttccctgtggatctctccgatta

SEQ ID NO: 3842 - DNA, 23 bp, Artificial Sequence
  human ApoB siRNA sequence
tccctgtggatctctccgattat

SEQ ID NO: 3843 - DNA, 23 bp, Artificial Sequence
  human ApoB siRNA sequence
ccctgtggatctctccgattatc

SEQ ID NO: 3844 - DNA, 23 bp, Artificial Sequence
  human ApoB siRNA sequence
cctgtggatctctccgattatcc

SEQ ID NO: 3845 - DNA, 23 bp, Artificial Sequence
  human ApoB siRNA sequence
ctgtggatctctccgattatcct

SEQ ID NO: 3846 - DNA, 23 bp, Artificial Sequence
  human ApoB siRNA sequence
tgtggatctctccgattatccta

SEQ ID NO: 3847 - DNA, 23 bp, Artificial Sequence
  human ApoB siRNA sequence
gtggatctctccgattatcctaa

SEQ ID NO: 3848 - DNA, 23 bp, Artificial Sequence
  human ApoB siRNA sequence
tggatctctccgattatcctaag

SEQ ID NO: 3849 - DNA, 23 bp, Artificial Sequence
  human ApoB siRNA sequence
ggatctctccgattatcctaaga

SEQ ID NO: 3850 - DNA, 23 bp, Artificial Sequence
  human ApoB siRNA sequence
gatctctccgattatcctaagag

SEQ ID NO: 3851 - DNA, 23 bp, Artificial Sequence
  human ApoB siRNA sequence
atctctccgattatcctaagagc

SEQ ID NO: 3852 - DNA, 23 bp, Artificial Sequence
  human ApoB siRNA sequence
tctctccgattatcctaagagct

SEQ ID NO: 3853 - DNA, 23 bp, Artificial Sequence
  human ApoB siRNA sequence
ctctccgattatcctaagagctt

SEQ ID NO: 3854 - DNA, 23 bp, Artificial Sequence
  human ApoB siRNA sequence
tctccgattatcctaagagcttg

SEQ ID NO: 3855 - DNA, 23 bp, Artificial Sequence
  human ApoB siRNA sequence
ctccgattatcctaagagcttgc

SEQ ID NO: 3856 - DNA, 23 bp, Artificial Sequence
  human ApoB siRNA sequence
tccgattatcctaagagcttgca

SEQ ID NO: 3857 - DNA, 23 bp, Artificial Sequence
  human ApoB siRNA sequence
ccgattatcctaagagcttgcat

SEQ ID NO: 3858 - DNA, 23 bp, Artificial Sequence
  human ApoB siRNA sequence
cgattatcctaagagcttgcata

SEQ ID NO: 3859 - DNA, 23 bp, Artificial Sequence
  human ApoB siRNA sequence
gattatcctaagagcttgcatat

SEQ ID NO: 3860 - DNA, 23 bp, Artificial Sequence
  human ApoB siRNA sequence
attatcctaagagcttgcatatg

SEQ ID NO: 3861 - DNA, 23 bp, Artificial Sequence
  human ApoB siRNA sequence
ttatcctaagagcttgcatatgt

SEQ ID NO: 3862 - DNA, 23 bp, Artificial Sequence
  human ApoB siRNA sequence
tatcctaagagcttgcatatgta

SEQ ID NO: 3863 - DNA, 23 bp, Artificial Sequence
  human ApoB siRNA sequence
atcctaagagcttgcatatgtat

SEQ ID NO: 3864 - DNA, 23 bp, Artificial Sequence
  human ApoB siRNA sequence
tcctaagagcttgcatatgtatg

SEQ ID NO: 3865 - DNA, 23 bp, Artificial Sequence
  human ApoB siRNA sequence
cctaagagcttgcatatgtatgc

SEQ ID NO: 3866 - DNA, 23 bp, Artificial Sequence
  human ApoB siRNA sequence
ctaagagcttgcatatgtatgct

SEQ ID NO: 3867 - DNA, 23 bp, Artificial Sequence
  human ApoB siRNA sequence
taagagcttgcatatgtatgcta

SEQ ID NO: 3868 - DNA, 23 bp, Artificial Sequence
  human ApoB siRNA sequence
aagagcttgcatatgtatgctaa

SEQ ID NO: 3869 - DNA, 23 bp, Artificial Sequence
  human ApoB siRNA sequence
agagcttgcatatgtatgctaat

SEQ ID NO: 3870 - DNA, 23 bp, Artificial Sequence
  human ApoB siRNA sequence
gagcttgcatatgtatgctaata

SEQ ID NO: 3871 - DNA, 23 bp, Artificial Sequence
  human ApoB siRNA sequence
agcttgcatatgtatgctaatag

SEQ ID NO: 3872 - DNA, 23 bp, Artificial Sequence
  human ApoB siRNA sequence
gcttgcatatgtatgctaataga

SEQ ID NO: 3873 - DNA, 23 bp, Artificial Sequence
  human ApoB siRNA sequence
cttgcatatgtatgctaatagac

SEQ ID NO: 3874 - DNA, 23 bp, Artificial Sequence
  human ApoB siRNA sequence
ttgcatatgtatgctaatagact

SEQ ID NO: 3875 - DNA, 23 bp, Artificial Sequence
  human ApoB siRNA sequence
tgcatatgtatgctaatagactc

SEQ ID NO: 3876 - DNA, 23 bp, Artificial Sequence
  human ApoB siRNA sequence
gcatatgtatgctaatagactcc

SEQ ID NO: 3877 - DNA, 23 bp, Artificial Sequence
  human ApoB siRNA sequence
catatgtatgctaatagactcct

SEQ ID NO: 3878 - DNA, 23 bp, Artificial Sequence
  human ApoB siRNA sequence
atatgtatgctaatagactcctg

SEQ ID NO: 3879 - DNA, 23 bp, Artificial Sequence
  human ApoB siRNA sequence
tatgtatgctaatagactcctgg

SEQ ID NO: 3880 - DNA, 23 bp, Artificial Sequence
  human ApoB siRNA sequence
atgtatgctaatagactcctgga

SEQ ID NO: 3881 - DNA, 23 bp, Artificial Sequence
  human ApoB siRNA sequence
tgtatgctaatagactcctggat

SEQ ID NO: 3882 - DNA, 23 bp, Artificial Sequence
  human ApoB siRNA sequence
gtatgctaatagactcctggatc

SEQ ID NO: 3883 - DNA, 23 bp, Artificial Sequence
  human ApoB siRNA sequence
tatgctaatagactcctggatca

SEQ ID NO: 3884 - DNA, 23 bp, Artificial Sequence
  human ApoB siRNA sequence
atgctaatagactcctggatcac

SEQ ID NO: 3885 - DNA, 23 bp, Artificial Sequence
  human ApoB siRNA sequence
tgctaatagactcctggatcaca

SEQ ID NO: 3886 - DNA, 23 bp, Artificial Sequence
  human ApoB siRNA sequence
gctaatagactcctggatcacag

SEQ ID NO: 3887 - DNA, 23 bp, Artificial Sequence
  human ApoB siRNA sequence
ctaatagactcctggatcacaga

SEQ ID NO: 3888 - DNA, 23 bp, Artificial Sequence
  human ApoB siRNA sequence
taatagactcctggatcacagag

SEQ ID NO: 3889 - DNA, 23 bp, Artificial Sequence
  human ApoB siRNA sequence
aatagactcctggatcacagagt

SEQ ID NO: 3890 - DNA, 23 bp, Artificial Sequence
  human ApoB siRNA sequence
atagactcctggatcacagagtc

SEQ ID NO: 3891 - DNA, 23 bp, Artificial Sequence
  human ApoB siRNA sequence
tagactcctggatcacagagtcc

SEQ ID NO: 3892 - DNA, 23 bp, Artificial Sequence
  human ApoB siRNA sequence
agactcctggatcacagagtccc

SEQ ID NO: 3893 - DNA, 23 bp, Artificial Sequence
  human ApoB siRNA sequence
gactcctggatcacagagtccct

SEQ ID NO: 3894 - DNA, 23 bp, Artificial Sequence
  human ApoB siRNA sequence
actcctggatcacagagtccctg

SEQ ID NO: 3895 - DNA, 23 bp, Artificial Sequence
  human ApoB siRNA sequence
ctcctggatcacagagtccctga

SEQ ID NO: 3896 - DNA, 23 bp, Artificial Sequence
  human ApoB siRNA sequence
tcctggatcacagagtccctgaa

SEQ ID NO: 3897 - DNA, 23 bp, Artificial Sequence
  human ApoB siRNA sequence
cctggatcacagagtccctgaaa

SEQ ID NO: 3898 - DNA, 23 bp, Artificial Sequence
  human ApoB siRNA sequence
ctggatcacagagtccctgaaac

SEQ ID NO: 3899 - DNA, 23 bp, Artificial Sequence
  human ApoB siRNA sequence
tggatcacagagtccctgaaaca

SEQ ID NO: 3900 - DNA, 23 bp, Artificial Sequence
  human ApoB siRNA sequence
ggatcacagagtccctgaaacag

SEQ ID NO: 3901 - DNA, 23 bp, Artificial Sequence
  human ApoB siRNA sequence
gatcacagagtccctgaaacaga

SEQ ID NO: 3902 - DNA, 23 bp, Artificial Sequence
  human ApoB siRNA sequence
atcacagagtccctgaaacagac

SEQ ID NO: 3903 - DNA, 23 bp, Artificial Sequence
  human ApoB siRNA sequence
tcacagagtccctgaaacagaca

SEQ ID NO: 3904 - DNA, 23 bp, Artificial Sequence
  human ApoB siRNA sequence
cacagagtccctgaaacagacat

SEQ ID NO: 3905 - DNA, 23 bp, Artificial Sequence
  human ApoB siRNA sequence
acagagtccctgaaacagacatg

SEQ ID NO: 3906 - DNA, 23 bp, Artificial Sequence
  human ApoB siRNA sequence
cagagtccctgaaacagacatga

SEQ ID NO: 3907 - DNA, 23 bp, Artificial Sequence
  human ApoB siRNA sequence
agagtccctgaaacagacatgac

SEQ ID NO: 3908 - DNA, 23 bp, Artificial Sequence
  human ApoB siRNA sequence
gagtccctgaaacagacatgact

SEQ ID NO: 3909 - DNA, 23 bp, Artificial Sequence
  human ApoB siRNA sequence
agtccctgaaacagacatgactt

SEQ ID NO: 3910 - DNA, 23 bp, Artificial Sequence
  human ApoB siRNA sequence
gtccctgaaacagacatgacttt

SEQ ID NO: 3911 - DNA, 23 bp, Artificial Sequence
  human ApoB siRNA sequence
tccctgaaacagacatgactttc

SEQ ID NO: 3912 - DNA, 23 bp, Artificial Sequence
  human ApoB siRNA sequence
ccctgaaacagacatgactttcc

SEQ ID NO: 3913 - DNA, 23 bp, Artificial Sequence
  human ApoB siRNA sequence
cctgaaacagacatgactttccg

SEQ ID NO: 3914 - DNA, 23 bp, Artificial Sequence
  human ApoB siRNA sequence
ctgaaacagacatgactttccgg

SEQ ID NO: 3915 - DNA, 23 bp, Artificial Sequence
  human ApoB siRNA sequence
tgaaacagacatgactttccggc

SEQ ID NO: 3916 - DNA, 23 bp, Artificial Sequence
  human ApoB siRNA sequence
gaaacagacatgactttccggca

SEQ ID NO: 3917 - DNA, 23 bp, Artificial Sequence
  human ApoB siRNA sequence
aaacagacatgactttccggcac

SEQ ID NO: 3918 - DNA, 23 bp, Artificial Sequence
  human ApoB siRNA sequence
aacagacatgactttccggcacg

SEQ ID NO: 3919 - DNA, 23 bp, Artificial Sequence
  human ApoB siRNA sequence
acagacatgactttccggcacgt

SEQ ID NO: 3920 - DNA, 23 bp, Artificial Sequence
  human ApoB siRNA sequence
cagacatgactttccggcacgtg

SEQ ID NO: 3921 - DNA, 23 bp, Artificial Sequence
  human ApoB siRNA sequence
agacatgactttccggcacgtgg

SEQ ID NO: 3922 - DNA, 23 bp, Artificial Sequence
  human ApoB siRNA sequence
gacatgactttccggcacgtggg

SEQ ID NO: 3923 - DNA, 23 bp, Artificial Sequence
  human ApoB siRNA sequence
acatgactttccggcacgtgggt

SEQ ID NO: 3924 - DNA, 23 bp, Artificial Sequence
  human ApoB siRNA sequence
catgactttccggcacgtgggtt

SEQ ID NO: 3925 - DNA, 23 bp, Artificial Sequence
  human ApoB siRNA sequence
atgactttccggcacgtgggttc

SEQ ID NO: 3926 - DNA, 23 bp, Artificial Sequence
  human ApoB siRNA sequence
tgactttccggcacgtgggttcc

SEQ ID NO: 3927 - DNA, 23 bp, Artificial Sequence
  human ApoB siRNA sequence
gactttccggcacgtgggttcca

SEQ ID NO: 3928 - DNA, 23 bp, Artificial Sequence
  human ApoB siRNA sequence
actttccggcacgtgggttccaa

SEQ ID NO: 3929 - DNA, 23 bp, Artificial Sequence
  human ApoB siRNA sequence
ctttccggcacgtgggttccaaa

SEQ ID NO: 3930 - DNA, 23 bp, Artificial Sequence
  human ApoB siRNA sequence
tttccggcacgtgggttccaaat

SEQ ID NO: 3931 - DNA, 23 bp, Artificial Sequence
  human ApoB siRNA sequence
ttccggcacgtgggttccaaatt

SEQ ID NO: 3932 - DNA, 23 bp, Artificial Sequence
  human ApoB siRNA sequence
tccggcacgtgggttccaaatta

SEQ ID NO: 3933 - DNA, 23 bp, Artificial Sequence
  human ApoB siRNA sequence
ccggcacgtgggttccaaattaa

SEQ ID NO: 3934 - DNA, 23 bp, Artificial Sequence
  human ApoB siRNA sequence
cggcacgtgggttccaaattaat

SEQ ID NO: 3935 - DNA, 23 bp, Artificial Sequence
  human ApoB siRNA sequence
ggcacgtgggttccaaattaata

SEQ ID NO: 3936 - DNA, 23 bp, Artificial Sequence
  human ApoB siRNA sequence
gcacgtgggttccaaattaatag

SEQ ID NO: 3937 - DNA, 23 bp, Artificial Sequence
  human ApoB siRNA sequence
cacgtgggttccaaattaatagt

SEQ ID NO: 3938 - DNA, 23 bp, Artificial Sequence
  human ApoB siRNA sequence
acgtgggttccaaattaatagtt

SEQ ID NO: 3939 - DNA, 23 bp, Artificial Sequence
  human ApoB siRNA sequence
cgtgggttccaaattaatagttg

SEQ ID NO: 3940 - DNA, 23 bp, Artificial Sequence
  human ApoB siRNA sequence
gtgggttccaaattaatagttgc

SEQ ID NO: 3941 - DNA, 23 bp, Artificial Sequence
  human ApoB siRNA sequence
tgggttccaaattaatagttgca

SEQ ID NO: 3942 - DNA, 23 bp, Artificial Sequence
  human ApoB siRNA sequence
gggttccaaattaatagttgcaa

SEQ ID NO: 3943 - DNA, 23 bp, Artificial Sequence
  human ApoB siRNA sequence
ggttccaaattaatagttgcaat

SEQ ID NO: 3944 - DNA, 23 bp, Artificial Sequence
  human ApoB siRNA sequence
gttccaaattaatagttgcaatg

SEQ ID NO: 3945 - DNA, 23 bp, Artificial Sequence
  human ApoB siRNA sequence
ttccaaattaatagttgcaatga

SEQ ID NO: 3946 - DNA, 23 bp, Artificial Sequence
  human ApoB siRNA sequence
tccaaattaatagttgcaatgag

SEQ ID NO: 3947 - DNA, 23 bp, Artificial Sequence
  human ApoB siRNA sequence
ccaaattaatagttgcaatgagc

SEQ ID NO: 3948 - DNA, 23 bp, Artificial Sequence
  human ApoB siRNA sequence
caaattaatagttgcaatgagct

SEQ ID NO: 3949 - DNA, 23 bp, Artificial Sequence
  human ApoB siRNA sequence
aaattaatagttgcaatgagctc

SEQ ID NO: 3950 - DNA, 23 bp, Artificial Sequence
  human ApoB siRNA sequence
aattaatagttgcaatgagctca

SEQ ID NO: 3951 - DNA, 23 bp, Artificial Sequence
  human ApoB siRNA sequence
attaatagttgcaatgagctcat

SEQ ID NO: 3952 - DNA, 23 bp, Artificial Sequence
  human ApoB siRNA sequence
ttaatagttgcaatgagctcatg

SEQ ID NO: 3953 - DNA, 23 bp, Artificial Sequence
  human ApoB siRNA sequence
taatagttgcaatgagctcatgg

SEQ ID NO: 3954 - DNA, 23 bp, Artificial Sequence
  human ApoB siRNA sequence
aatagttgcaatgagctcatggc

SEQ ID NO: 3955 - DNA, 23 bp, Artificial Sequence
  human ApoB siRNA sequence
atagttgcaatgagctcatggct

SEQ ID NO: 3956 - DNA, 23 bp, Artificial Sequence
  human ApoB siRNA sequence
tagttgcaatgagctcatggctt

SEQ ID NO: 3957 - DNA, 23 bp, Artificial Sequence
  human ApoB siRNA sequence
agttgcaatgagctcatggcttc

SEQ ID NO: 3958 - DNA, 23 bp, Artificial Sequence
  human ApoB siRNA sequence
gttgcaatgagctcatggcttca

SEQ ID NO: 3959 - DNA, 23 bp, Artificial Sequence
  human ApoB siRNA sequence
ttgcaatgagctcatggcttcag

SEQ ID NO: 3960 - DNA, 23 bp, Artificial Sequence
  human ApoB siRNA sequence
tgcaatgagctcatggcttcaga

SEQ ID NO: 3961 - DNA, 23 bp, Artificial Sequence
  human ApoB siRNA sequence
gcaatgagctcatggcttcagaa

SEQ ID NO: 3962 - DNA, 23 bp, Artificial Sequence
  human ApoB siRNA sequence
caatgagctcatggcttcagaag

SEQ ID NO: 3963 - DNA, 23 bp, Artificial Sequence
  human ApoB siRNA sequence
aatgagctcatggcttcagaagg

SEQ ID NO: 3964 - DNA, 23 bp, Artificial Sequence
  human ApoB siRNA sequence
atgagctcatggcttcagaaggc

SEQ ID NO: 3965 - DNA, 23 bp, Artificial Sequence
  human ApoB siRNA sequence
tgagctcatggcttcagaaggca

SEQ ID NO: 3966 - DNA, 23 bp, Artificial Sequence
  human ApoB siRNA sequence
gagctcatggcttcagaaggcat

SEQ ID NO: 3967 - DNA, 23 bp, Artificial Sequence
  human ApoB siRNA sequence
agctcatggcttcagaaggcatc

SEQ ID NO: 3968 - DNA, 23 bp, Artificial Sequence
  human ApoB siRNA sequence
gctcatggcttcagaaggcatct

SEQ ID NO: 3969 - DNA, 23 bp, Artificial Sequence
  human ApoB siRNA sequence
ctcatggcttcagaaggcatctg

SEQ ID NO: 3970 - DNA, 23 bp, Artificial Sequence
  human ApoB siRNA sequence
tcatggcttcagaaggcatctgg

SEQ ID NO: 3971 - DNA, 23 bp, Artificial Sequence
  human ApoB siRNA sequence
catggcttcagaaggcatctggg

SEQ ID NO: 3972 - DNA, 23 bp, Artificial Sequence
  human ApoB siRNA sequence
atggcttcagaaggcatctggga

SEQ ID NO: 3973 - DNA, 23 bp, Artificial Sequence
  human ApoB siRNA sequence
tggcttcagaaggcatctgggag

SEQ ID NO: 3974 - DNA, 23 bp, Artificial Sequence
  human ApoB siRNA sequence
ggcttcagaaggcatctgggagt

SEQ ID NO: 3975 - DNA, 23 bp, Artificial Sequence
  human ApoB siRNA sequence
gcttcagaaggcatctgggagtc

SEQ ID NO: 3976 - DNA, 23 bp, Artificial Sequence
  human ApoB siRNA sequence
cttcagaaggcatctgggagtct

SEQ ID NO: 3977 - DNA, 23 bp, Artificial Sequence
  human ApoB siRNA sequence
ttcagaaggcatctgggagtctt

SEQ ID NO: 3978 - DNA, 23 bp, Artificial Sequence
  human ApoB siRNA sequence
tcagaaggcatctgggagtcttc

SEQ ID NO: 3979 - DNA, 23 bp, Artificial Sequence
  human ApoB siRNA sequence
cagaaggcatctgggagtcttcc

SEQ ID NO: 3980 - DNA, 23 bp, Artificial Sequence
  human ApoB siRNA sequence
agaaggcatctgggagtcttcct

SEQ ID NO: 3981 - DNA, 23 bp, Artificial Sequence
  human ApoB siRNA sequence
gaaggcatctgggagtcttcctt

SEQ ID NO: 3982 - DNA, 23 bp, Artificial Sequence
  human ApoB siRNA sequence
aaggcatctgggagtcttcctta

SEQ ID NO: 3983 - DNA, 23 bp, Artificial Sequence
  human ApoB siRNA sequence
aggcatctgggagtcttccttat

SEQ ID NO: 3984 - DNA, 23 bp, Artificial Sequence
  human ApoB siRNA sequence
ggcatctgggagtcttccttata

SEQ ID NO: 3985 - DNA, 23 bp, Artificial Sequence
  human ApoB siRNA sequence
gcatctgggagtcttccttatac

SEQ ID NO: 3986 - DNA, 23 bp, Artificial Sequence
  human ApoB siRNA sequence
catctgggagtcttccttatacc

SEQ ID NO: 3987 - DNA, 23 bp, Artificial Sequence
  human ApoB siRNA sequence
atctgggagtcttccttataccc

SEQ ID NO: 3988 - DNA, 23 bp, Artificial Sequence
  human ApoB siRNA sequence
tctgggagtcttccttataccca

SEQ ID NO: 3989 - DNA, 23 bp, Artificial Sequence
  human ApoB siRNA sequence
ctgggagtcttccttatacccag

SEQ ID NO: 3990 - DNA, 23 bp, Artificial Sequence
  human ApoB siRNA sequence
tgggagtcttccttatacccaga

SEQ ID NO: 3991 - DNA, 23 bp, Artificial Sequence
  human ApoB siRNA sequence
gggagtcttccttatacccagac

SEQ ID NO: 3992 - DNA, 23 bp, Artificial Sequence
  human ApoB siRNA sequence
ggagtcttccttatacccagact

SEQ ID NO: 3993 - DNA, 23 bp, Artificial Sequence
  human ApoB siRNA sequence
gagtcttccttatacccagactt

SEQ ID NO: 3994 - DNA, 23 bp, Artificial Sequence
  human ApoB siRNA sequence
agtcttccttatacccagacttt

SEQ ID NO: 3995 - DNA, 23 bp, Artificial Sequence
  human ApoB siRNA sequence
gtcttccttatacccagactttg

SEQ ID NO: 3996 - DNA, 23 bp, Artificial Sequence
  human ApoB siRNA sequence
tcttccttatacccagactttgc

SEQ ID NO: 3997 - DNA, 23 bp, Artificial Sequence
  human ApoB siRNA sequence
cttccttatacccagactttgca

SEQ ID NO: 3998 - DNA, 23 bp, Artificial Sequence
  human ApoB siRNA sequence
ttccttatacccagactttgcaa

SEQ ID NO: 3999 - DNA, 23 bp, Artificial Sequence
  human ApoB siRNA sequence
tccttatacccagactttgcaag

SEQ ID NO: 4000 - DNA, 23 bp, Artificial Sequence
  human ApoB siRNA sequence
ccttatacccagactttgcaaga

SEQ ID NO: 4001 - DNA, 23 bp, Artificial Sequence
  human ApoB siRNA sequence
cttatacccagactttgcaagac

SEQ ID NO: 4002 - DNA, 23 bp, Artificial Sequence
  human ApoB siRNA sequence
ttatacccagactttgcaagacc

SEQ ID NO: 4003 - DNA, 23 bp, Artificial Sequence
  human ApoB siRNA sequence
tatacccagactttgcaagacca

SEQ ID NO: 4004 - DNA, 23 bp, Artificial Sequence
  human ApoB siRNA sequence
atacccagactttgcaagaccac

SEQ ID NO: 4005 - DNA, 23 bp, Artificial Sequence
  human ApoB siRNA sequence
tacccagactttgcaagaccacc

SEQ ID NO: 4006 - DNA, 23 bp, Artificial Sequence
  human ApoB siRNA sequence
acccagactttgcaagaccacct

SEQ ID NO: 4007 - DNA, 23 bp, Artificial Sequence
  human ApoB siRNA sequence
cccagactttgcaagaccacctc

SEQ ID NO: 4008 - DNA, 23 bp, Artificial Sequence
  human ApoB siRNA sequence
ccagactttgcaagaccacctca

SEQ ID NO: 4009 - DNA, 23 bp, Artificial Sequence
  human ApoB siRNA sequence
cagactttgcaagaccacctcaa

SEQ ID NO: 4010 - DNA, 23 bp, Artificial Sequence
  human ApoB siRNA sequence
agactttgcaagaccacctcaat

SEQ ID NO: 4011 - DNA, 23 bp, Artificial Sequence
  human ApoB siRNA sequence
gactttgcaagaccacctcaata

SEQ ID NO: 4012 - DNA, 23 bp, Artificial Sequence
  human ApoB siRNA sequence
actttgcaagaccacctcaatag

SEQ ID NO: 4013 - DNA, 23 bp, Artificial Sequence
  human ApoB siRNA sequence
ctttgcaagaccacctcaatagc

SEQ ID NO: 4014 - DNA, 23 bp, Artificial Sequence
  human ApoB siRNA sequence
tttgcaagaccacctcaatagcc

SEQ ID NO: 4015 - DNA, 23 bp, Artificial Sequence
  human ApoB siRNA sequence
ttgcaagaccacctcaatagcct

SEQ ID NO: 4016 - DNA, 23 bp, Artificial Sequence
  human ApoB siRNA sequence
tgcaagaccacctcaatagcctg

SEQ ID NO: 4017 - DNA, 23 bp, Artificial Sequence
  human ApoB siRNA sequence
gcaagaccacctcaatagcctga

SEQ ID NO: 4018 - DNA, 23 bp, Artificial Sequence
  human ApoB siRNA sequence
caagaccacctcaatagcctgaa

SEQ ID NO: 4019 - DNA, 23 bp, Artificial Sequence
  human ApoB siRNA sequence
aagaccacctcaatagcctgaag

SEQ ID NO: 4020 - DNA, 23 bp, Artificial Sequence
  human ApoB siRNA sequence
agaccacctcaatagcctgaagg

SEQ ID NO: 4021 - DNA, 23 bp, Artificial Sequence
  human ApoB siRNA sequence
gaccacctcaatagcctgaagga

SEQ ID NO: 4022 - DNA, 23 bp, Artificial Sequence
  human ApoB siRNA sequence
accacctcaatagcctgaaggag

SEQ ID NO: 4023 - DNA, 23 bp, Artificial Sequence
  human ApoB siRNA sequence
ccacctcaatagcctgaaggagt

SEQ ID NO: 4024 - DNA, 23 bp, Artificial Sequence
  human ApoB siRNA sequence
cacctcaatagcctgaaggagtt

SEQ ID NO: 4025 - DNA, 23 bp, Artificial Sequence
  human ApoB siRNA sequence
acctcaatagcctgaaggagttc

SEQ ID NO: 4026 - DNA, 23 bp, Artificial Sequence
  human ApoB siRNA sequence
cctcaatagcctgaaggagttca

SEQ ID NO: 4027 - DNA, 23 bp, Artificial Sequence
  human ApoB siRNA sequence
ctcaatagcctgaaggagttcaa

SEQ ID NO: 4028 - DNA, 23 bp, Artificial Sequence
  human ApoB siRNA sequence
tcaatagcctgaaggagttcaac

SEQ ID NO: 4029 - DNA, 23 bp, Artificial Sequence
  human ApoB siRNA sequence
caatagcctgaaggagttcaacc

SEQ ID NO: 4030 - DNA, 23 bp, Artificial Sequence
  human ApoB siRNA sequence
aatagcctgaaggagttcaacct

SEQ ID NO: 4031 - DNA, 23 bp, Artificial Sequence
  human ApoB siRNA sequence
atagcctgaaggagttcaacctc

SEQ ID NO: 4032 - DNA, 23 bp, Artificial Sequence
  human ApoB siRNA sequence
tagcctgaaggagttcaacctcc

SEQ ID NO: 4033 - DNA, 23 bp, Artificial Sequence
  human ApoB siRNA sequence
agcctgaaggagttcaacctcca

SEQ ID NO: 4034 - DNA, 23 bp, Artificial Sequence
  human ApoB siRNA sequence
gcctgaaggagttcaacctccag

SEQ ID NO: 4035 - DNA, 23 bp, Artificial Sequence
  human ApoB siRNA sequence
cctgaaggagttcaacctccaga

SEQ ID NO: 4036 - DNA, 23 bp, Artificial Sequence
  human ApoB siRNA sequence
ctgaaggagttcaacctccagaa

SEQ ID NO: 4037 - DNA, 23 bp, Artificial Sequence
  human ApoB siRNA sequence
tgaaggagttcaacctccagaac

SEQ ID NO: 4038 - DNA, 23 bp, Artificial Sequence
  human ApoB siRNA sequence
gaaggagttcaacctccagaaca

SEQ ID NO: 4039 - DNA, 23 bp, Artificial Sequence
  human ApoB siRNA sequence
aaggagttcaacctccagaacat

SEQ ID NO: 4040 - DNA, 23 bp, Artificial Sequence
  human ApoB siRNA sequence
aggagttcaacctccagaacatg

SEQ ID NO: 4041 - DNA, 23 bp, Artificial Sequence
  human ApoB siRNA sequence
ggagttcaacctccagaacatgg

SEQ ID NO: 4042 - DNA, 23 bp, Artificial Sequence
  human ApoB siRNA sequence
gagttcaacctccagaacatggg

SEQ ID NO: 4043 - DNA, 23 bp, Artificial Sequence
  human ApoB siRNA sequence
agttcaacctccagaacatggga

SEQ ID NO: 4044 - DNA, 23 bp, Artificial Sequence
  human ApoB siRNA sequence
gttcaacctccagaacatgggat

SEQ ID NO: 4045 - DNA, 23 bp, Artificial Sequence
  human ApoB siRNA sequence
ttcaacctccagaacatgggatt

SEQ ID NO: 4046 - DNA, 23 bp, Artificial Sequence
  human ApoB siRNA sequence
tcaacctccagaacatgggattg

SEQ ID NO: 4047 - DNA, 23 bp, Artificial Sequence
  human ApoB siRNA sequence
caacctccagaacatgggattgc

SEQ ID NO: 4048 - DNA, 23 bp, Artificial Sequence
  human ApoB siRNA sequence
aacctccagaacatgggattgcc

SEQ ID NO: 4049 - DNA, 23 bp, Artificial Sequence
  human ApoB siRNA sequence
acctccagaacatgggattgcca

SEQ ID NO: 4050 - DNA, 23 bp, Artificial Sequence
  human ApoB siRNA sequence
cctccagaacatgggattgccag

SEQ ID NO: 4051 - DNA, 23 bp, Artificial Sequence
  human ApoB siRNA sequence
ctccagaacatgggattgccaga

SEQ ID NO: 4052 - DNA, 23 bp, Artificial Sequence
  human ApoB siRNA sequence
tccagaacatgggattgccagac

SEQ ID NO: 4053 - DNA, 23 bp, Artificial Sequence
  human ApoB siRNA sequence
ccagaacatgggattgccagact

SEQ ID NO: 4054 - DNA, 23 bp, Artificial Sequence
  human ApoB siRNA sequence
cagaacatgggattgccagactt

SEQ ID NO: 4055 - DNA, 23 bp, Artificial Sequence
  human ApoB siRNA sequence
agaacatgggattgccagacttc

SEQ ID NO: 4056 - DNA, 23 bp, Artificial Sequence
  human ApoB siRNA sequence
gaacatgggattgccagacttcc

SEQ ID NO: 4057 - DNA, 23 bp, Artificial Sequence
  human ApoB siRNA sequence
aacatgggattgccagacttcca

SEQ ID NO: 4058 - DNA, 23 bp, Artificial Sequence
  human ApoB siRNA sequence
acatgggattgccagacttccac

SEQ ID NO: 4059 - DNA, 23 bp, Artificial Sequence
  human ApoB siRNA sequence
catgggattgccagacttccaca

SEQ ID NO: 4060 - DNA, 23 bp, Artificial Sequence
  human ApoB siRNA sequence
atgggattgccagacttccacat

SEQ ID NO: 4061 - DNA, 23 bp, Artificial Sequence
  human ApoB siRNA sequence
tgggattgccagacttccacatc

SEQ ID NO: 4062 - DNA, 23 bp, Artificial Sequence
  human ApoB siRNA sequence
gggattgccagacttccacatcc

SEQ ID NO: 4063 - DNA, 23 bp, Artificial Sequence
  human ApoB siRNA sequence
ggattgccagacttccacatccc

SEQ ID NO: 4064 - DNA, 23 bp, Artificial Sequence
  human ApoB siRNA sequence
gattgccagacttccacatccca

SEQ ID NO: 4065 - DNA, 23 bp, Artificial Sequence
  human ApoB siRNA sequence
attgccagacttccacatcccag

SEQ ID NO: 4066 - DNA, 23 bp, Artificial Sequence
  human ApoB siRNA sequence
ttgccagacttccacatcccaga

SEQ ID NO: 4067 - DNA, 23 bp, Artificial Sequence
  human ApoB siRNA sequence
tgccagacttccacatcccagaa

SEQ ID NO: 4068 - DNA, 23 bp, Artificial Sequence
  human ApoB siRNA sequence
gccagacttccacatcccagaaa

SEQ ID NO: 4069 - DNA, 23 bp, Artificial Sequence
  human ApoB siRNA sequence
ccagacttccacatcccagaaaa

SEQ ID NO: 4070 - DNA, 23 bp, Artificial Sequence
  human ApoB siRNA sequence
cagacttccacatcccagaaaac

SEQ ID NO: 4071 - DNA, 23 bp, Artificial Sequence
  human ApoB siRNA sequence
agacttccacatcccagaaaacc

SEQ ID NO: 4072 - DNA, 23 bp, Artificial Sequence
  human ApoB siRNA sequence
gacttccacatcccagaaaacct

SEQ ID NO: 4073 - DNA, 23 bp, Artificial Sequence
  human ApoB siRNA sequence
acttccacatcccagaaaacctc

SEQ ID NO: 4074 - DNA, 23 bp, Artificial Sequence
  human ApoB siRNA sequence
cttccacatcccagaaaacctct

SEQ ID NO: 4075 - DNA, 23 bp, Artificial Sequence
  human ApoB siRNA sequence
ttccacatcccagaaaacctctt

SEQ ID NO: 4076 - DNA, 23 bp, Artificial Sequence
  human ApoB siRNA sequence
tccacatcccagaaaacctcttc

SEQ ID NO: 4077 - DNA, 23 bp, Artificial Sequence
  human ApoB siRNA sequence
ccacatcccagaaaacctcttct

SEQ ID NO: 4078 - DNA, 23 bp, Artificial Sequence
  human ApoB siRNA sequence
cacatcccagaaaacctcttctt

SEQ ID NO: 4079 - DNA, 23 bp, Artificial Sequence
  human ApoB siRNA sequence
acatcccagaaaacctcttctta

SEQ ID NO: 4080 - DNA, 23 bp, Artificial Sequence
  human ApoB siRNA sequence
catcccagaaaacctcttcttaa

SEQ ID NO: 4081 - DNA, 23 bp, Artificial Sequence
  human ApoB siRNA sequence
atcccagaaaacctcttcttaaa

SEQ ID NO: 4082 - DNA, 23 bp, Artificial Sequence
  human ApoB siRNA sequence
tcccagaaaacctcttcttaaaa

SEQ ID NO: 4083 - DNA, 23 bp, Artificial Sequence
  human ApoB siRNA sequence
cccagaaaacctcttcttaaaaa

SEQ ID NO: 4084 - DNA, 23 bp, Artificial Sequence
  human ApoB siRNA sequence
ccagaaaacctcttcttaaaaag

SEQ ID NO: 4085 - DNA, 23 bp, Artificial Sequence
  human ApoB siRNA sequence
cagaaaacctcttcttaaaaagc

SEQ ID NO: 4086 - DNA, 23 bp, Artificial Sequence
  human ApoB siRNA sequence
agaaaacctcttcttaaaaagcg

SEQ ID NO: 4087 - DNA, 23 bp, Artificial Sequence
  human ApoB siRNA sequence
gaaaacctcttcttaaaaagcga

SEQ ID NO: 4088 - DNA, 23 bp, Artificial Sequence
  human ApoB siRNA sequence
aaaacctcttcttaaaaagcgat

SEQ ID NO: 4089 - DNA, 23 bp, Artificial Sequence
  human ApoB siRNA sequence
aaacctcttcttaaaaagcgatg

SEQ ID NO: 4090 - DNA, 23 bp, Artificial Sequence
  human ApoB siRNA sequence
aacctcttcttaaaaagcgatgg

SEQ ID NO: 4091 - DNA, 23 bp, Artificial Sequence
  human ApoB siRNA sequence
acctcttcttaaaaagcgatggc

SEQ ID NO: 4092 - DNA, 23 bp, Artificial Sequence
  human ApoB siRNA sequence
cctcttcttaaaaagcgatggcc

SEQ ID NO: 4093 - DNA, 23 bp, Artificial Sequence
  human ApoB siRNA sequence
ctcttcttaaaaagcgatggccg

SEQ ID NO: 4094 - DNA, 23 bp, Artificial Sequence
  human ApoB siRNA sequence
tcttcttaaaaagcgatggccgg

SEQ ID NO: 4095 - DNA, 23 bp, Artificial Sequence
  human ApoB siRNA sequence
cttcttaaaaagcgatggccggg

SEQ ID NO: 4096 - DNA, 23 bp, Artificial Sequence
  human ApoB siRNA sequence
ttcttaaaaagcgatggccgggt

SEQ ID NO: 4097 - DNA, 23 bp, Artificial Sequence
  human ApoB siRNA sequence
tcttaaaaagcgatggccgggtc

SEQ ID NO: 4098 - DNA, 23 bp, Artificial Sequence
  human ApoB siRNA sequence
cttaaaaagcgatggccgggtca

SEQ ID NO: 4099 - DNA, 23 bp, Artificial Sequence
  human ApoB siRNA sequence
ttaaaaagcgatggccgggtcaa

SEQ ID NO: 4100 - DNA, 23 bp, Artificial Sequence
  human ApoB siRNA sequence
taaaaagcgatggccgggtcaaa

SEQ ID NO: 4101 - DNA, 23 bp, Artificial Sequence
  human ApoB siRNA sequence
aaaaagcgatggccgggtcaaat

SEQ ID NO: 4102 - DNA, 23 bp, Artificial Sequence
  human ApoB siRNA sequence
aaaagcgatggccgggtcaaata

SEQ ID NO: 4103 - DNA, 23 bp, Artificial Sequence
  human ApoB siRNA sequence
aaagcgatggccgggtcaaatat

SEQ ID NO: 4104 - DNA, 23 bp, Artificial Sequence
  human ApoB siRNA sequence
aagcgatggccgggtcaaatata

SEQ ID NO: 4105 - DNA, 23 bp, Artificial Sequence
  human ApoB siRNA sequence
agcgatggccgggtcaaatatac

SEQ ID NO: 4106 - DNA, 23 bp, Artificial Sequence
  human ApoB siRNA sequence
gcgatggccgggtcaaatatacc

SEQ ID NO: 4107 - DNA, 23 bp, Artificial Sequence
  human ApoB siRNA sequence
cgatggccgggtcaaatatacct

SEQ ID NO: 4108 - DNA, 23 bp, Artificial Sequence
  human ApoB siRNA sequence
gatggccgggtcaaatatacctt

SEQ ID NO: 4109 - DNA, 23 bp, Artificial Sequence
  human ApoB siRNA sequence
atggccgggtcaaatataccttg

SEQ ID NO: 4110 - DNA, 23 bp, Artificial Sequence
  human ApoB siRNA sequence
tggccgggtcaaatataccttga

SEQ ID NO: 4111 - DNA, 23 bp, Artificial Sequence
  human ApoB siRNA sequence
ggccgggtcaaatataccttgaa

SEQ ID NO: 4112 - DNA, 23 bp, Artificial Sequence
  human ApoB siRNA sequence
gccgggtcaaatataccttgaac

SEQ ID NO: 4113 - DNA, 23 bp, Artificial Sequence
  human ApoB siRNA sequence
ccgggtcaaatataccttgaaca

SEQ ID NO: 4114 - DNA, 23 bp, Artificial Sequence
  human ApoB siRNA sequence
cgggtcaaatataccttgaacaa

SEQ ID NO: 4115 - DNA, 23 bp, Artificial Sequence
  human ApoB siRNA sequence
gggtcaaatataccttgaacaag

SEQ ID NO: 4116 - DNA, 23 bp, Artificial Sequence
  human ApoB siRNA sequence
ggtcaaatataccttgaacaaga

SEQ ID NO: 4117 - DNA, 23 bp, Artificial Sequence
  human ApoB siRNA sequence
gtcaaatataccttgaacaagaa

SEQ ID NO: 4118 - DNA, 23 bp, Artificial Sequence
  human ApoB siRNA sequence
tcaaatataccttgaacaagaac

SEQ ID NO: 4119 - DNA, 23 bp, Artificial Sequence
  human ApoB siRNA sequence
caaatataccttgaacaagaaca

SEQ ID NO: 4120 - DNA, 23 bp, Artificial Sequence
  human ApoB siRNA sequence
aaatataccttgaacaagaacag

SEQ ID NO: 4121 - DNA, 23 bp, Artificial Sequence
  human ApoB siRNA sequence
aatataccttgaacaagaacagt

SEQ ID NO: 4122 - DNA, 23 bp, Artificial Sequence
  human ApoB siRNA sequence
atataccttgaacaagaacagtt

SEQ ID NO: 4123 - DNA, 23 bp, Artificial Sequence
  human ApoB siRNA sequence
tataccttgaacaagaacagttt

SEQ ID NO: 4124 - DNA, 23 bp, Artificial Sequence
  human ApoB siRNA sequence
ataccttgaacaagaacagtttg

SEQ ID NO: 4125 - DNA, 23 bp, Artificial Sequence
  human ApoB siRNA sequence
taccttgaacaagaacagtttga

SEQ ID NO: 4126 - DNA, 23 bp, Artificial Sequence
  human ApoB siRNA sequence
accttgaacaagaacagtttgaa

SEQ ID NO: 4127 - DNA, 23 bp, Artificial Sequence
  human ApoB siRNA sequence
ccttgaacaagaacagtttgaaa

SEQ ID NO: 4128 - DNA, 23 bp, Artificial Sequence
  human ApoB siRNA sequence
cttgaacaagaacagtttgaaaa

SEQ ID NO: 4129 - DNA, 23 bp, Artificial Sequence
  human ApoB siRNA sequence
ttgaacaagaacagtttgaaaat

SEQ ID NO: 4130 - DNA, 23 bp, Artificial Sequence
  human ApoB siRNA sequence
tgaacaagaacagtttgaaaatt

SEQ ID NO: 4131 - DNA, 23 bp, Artificial Sequence
  human ApoB siRNA sequence
gaacaagaacagtttgaaaattg

SEQ ID NO: 4132 - DNA, 23 bp, Artificial Sequence
  human ApoB siRNA sequence
aacaagaacagtttgaaaattga

SEQ ID NO: 4133 - DNA, 23 bp, Artificial Sequence
  human ApoB siRNA sequence
acaagaacagtttgaaaattgag

SEQ ID NO: 4134 - DNA, 23 bp, Artificial Sequence
  human ApoB siRNA sequence
caagaacagtttgaaaattgaga

SEQ ID NO: 4135 - DNA, 23 bp, Artificial Sequence
  human ApoB siRNA sequence
aagaacagtttgaaaattgagat

SEQ ID NO: 4136 - DNA, 23 bp, Artificial Sequence
  human ApoB siRNA sequence
agaacagtttgaaaattgagatt

SEQ ID NO: 4137 - DNA, 23 bp, Artificial Sequence
  human ApoB siRNA sequence
gaacagtttgaaaattgagattc

SEQ ID NO: 4138 - DNA, 23 bp, Artificial Sequence
  human ApoB siRNA sequence
aacagtttgaaaattgagattcc

SEQ ID NO: 4139 - DNA, 23 bp, Artificial Sequence
  human ApoB siRNA sequence
acagtttgaaaattgagattcct

SEQ ID NO: 4140 - DNA, 23 bp, Artificial Sequence
  human ApoB siRNA sequence
cagtttgaaaattgagattcctt

SEQ ID NO: 4141 - DNA, 23 bp, Artificial Sequence
  human ApoB siRNA sequence
agtttgaaaattgagattccttt

SEQ ID NO: 4142 - DNA, 23 bp, Artificial Sequence
  human ApoB siRNA sequence
gtttgaaaattgagattcctttg

SEQ ID NO: 4143 - DNA, 23 bp, Artificial Sequence
  human ApoB siRNA sequence
tttgaaaattgagattcctttgc

SEQ ID NO: 4144 - DNA, 23 bp, Artificial Sequence
  human ApoB siRNA sequence
ttgaaaattgagattcctttgcc

SEQ ID NO: 4145 - DNA, 23 bp, Artificial Sequence
  human ApoB siRNA sequence
tgaaaattgagattcctttgcct

SEQ ID NO: 4146 - DNA, 23 bp, Artificial Sequence
  human ApoB siRNA sequence
gaaaattgagattcctttgcctt

SEQ ID NO: 4147 - DNA, 23 bp, Artificial Sequence
  human ApoB siRNA sequence
aaaattgagattcctttgccttt

SEQ ID NO: 4148 - DNA, 23 bp, Artificial Sequence
  human ApoB siRNA sequence
aaattgagattcctttgcctttt

SEQ ID NO: 4149 - DNA, 23 bp, Artificial Sequence
  human ApoB siRNA sequence
aattgagattcctttgccttttg

SEQ ID NO: 4150 - DNA, 23 bp, Artificial Sequence
  human ApoB siRNA sequence
attgagattcctttgccttttgg

SEQ ID NO: 4151 - DNA, 23 bp, Artificial Sequence
  human ApoB siRNA sequence
ttgagattcctttgccttttggt

SEQ ID NO: 4152 - DNA, 23 bp, Artificial Sequence
  human ApoB siRNA sequence
tgagattcctttgccttttggtg

SEQ ID NO: 4153 - DNA, 23 bp, Artificial Sequence
  human ApoB siRNA sequence
gagattcctttgccttttggtgg

SEQ ID NO: 4154 - DNA, 23 bp, Artificial Sequence
  human ApoB siRNA sequence
agattcctttgccttttggtggc

SEQ ID NO: 4155 - DNA, 23 bp, Artificial Sequence
  human ApoB siRNA sequence
gattcctttgccttttggtggca

SEQ ID NO: 4156 - DNA, 23 bp, Artificial Sequence
  human ApoB siRNA sequence
attcctttgccttttggtggcaa

SEQ ID NO: 4157 - DNA, 23 bp, Artificial Sequence
  human ApoB siRNA sequence
ttcctttgccttttggtggcaaa

SEQ ID NO: 4158 - DNA, 23 bp, Artificial Sequence
  human ApoB siRNA sequence
tcctttgccttttggtggcaaat

SEQ ID NO: 4159 - DNA, 23 bp, Artificial Sequence
  human ApoB siRNA sequence
cctttgccttttggtggcaaatc

SEQ ID NO: 4160 - DNA, 23 bp, Artificial Sequence
  human ApoB siRNA sequence
ctttgccttttggtggcaaatcc

SEQ ID NO: 4161 - DNA, 23 bp, Artificial Sequence
  human ApoB siRNA sequence
tttgccttttggtggcaaatcct

SEQ ID NO: 4162 - DNA, 23 bp, Artificial Sequence
  human ApoB siRNA sequence
ttgccttttggtggcaaatcctc

SEQ ID NO: 4163 - DNA, 23 bp, Artificial Sequence
  human ApoB siRNA sequence
tgccttttggtggcaaatcctcc

SEQ ID NO: 4164 - DNA, 23 bp, Artificial Sequence
  human ApoB siRNA sequence
gccttttggtggcaaatcctcca

SEQ ID NO: 4165 - DNA, 23 bp, Artificial Sequence
  human ApoB siRNA sequence
ccttttggtggcaaatcctccag

SEQ ID NO: 4166 - DNA, 23 bp, Artificial Sequence
  human ApoB siRNA sequence
cttttggtggcaaatcctccaga

SEQ ID NO: 4167 - DNA, 23 bp, Artificial Sequence
  human ApoB siRNA sequence
ttttggtggcaaatcctccagag

SEQ ID NO: 4168 - DNA, 23 bp, Artificial Sequence
  human ApoB siRNA sequence
tttggtggcaaatcctccagaga

SEQ ID NO: 4169 - DNA, 23 bp, Artificial Sequence
  human ApoB siRNA sequence
ttggtggcaaatcctccagagat

SEQ ID NO: 4170 - DNA, 23 bp, Artificial Sequence
  human ApoB siRNA sequence
tggtggcaaatcctccagagatc

SEQ ID NO: 4171 - DNA, 23 bp, Artificial Sequence
  human ApoB siRNA sequence
ggtggcaaatcctccagagatct

SEQ ID NO: 4172 - DNA, 23 bp, Artificial Sequence
  human ApoB siRNA sequence
gtggcaaatcctccagagatcta

SEQ ID NO: 4173 - DNA, 23 bp, Artificial Sequence
  human ApoB siRNA sequence
tggcaaatcctccagagatctaa

SEQ ID NO: 4174 - DNA, 23 bp, Artificial Sequence
  human ApoB siRNA sequence
ggcaaatcctccagagatctaaa

SEQ ID NO: 4175 - DNA, 23 bp, Artificial Sequence
  human ApoB siRNA sequence
gcaaatcctccagagatctaaag

SEQ ID NO: 4176 - DNA, 23 bp, Artificial Sequence
  human ApoB siRNA sequence
caaatcctccagagatctaaaga

SEQ ID NO: 4177 - DNA, 23 bp, Artificial Sequence
  human ApoB siRNA sequence
aaatcctccagagatctaaagat

SEQ ID NO: 4178 - DNA, 23 bp, Artificial Sequence
  human ApoB siRNA sequence
aatcctccagagatctaaagatg

SEQ ID NO: 4179 - DNA, 23 bp, Artificial Sequence
  human ApoB siRNA sequence
atcctccagagatctaaagatgt

SEQ ID NO: 4180 - DNA, 23 bp, Artificial Sequence
  human ApoB siRNA sequence
tcctccagagatctaaagatgtt

SEQ ID NO: 4181 - DNA, 23 bp, Artificial Sequence
  human ApoB siRNA sequence
cctccagagatctaaagatgtta

SEQ ID NO: 4182 - DNA, 23 bp, Artificial Sequence
  human ApoB siRNA sequence
ctccagagatctaaagatgttag

SEQ ID NO: 4183 - DNA, 23 bp, Artificial Sequence
  human ApoB siRNA sequence
tccagagatctaaagatgttaga

SEQ ID NO: 4184 - DNA, 23 bp, Artificial Sequence
  human ApoB siRNA sequence
ccagagatctaaagatgttagag

SEQ ID NO: 4185 - DNA, 23 bp, Artificial Sequence
  human ApoB siRNA sequence
cagagatctaaagatgttagaga

SEQ ID NO: 4186 - DNA, 23 bp, Artificial Sequence
  human ApoB siRNA sequence
agagatctaaagatgttagagac

SEQ ID NO: 4187 - DNA, 23 bp, Artificial Sequence
  human ApoB siRNA sequence
gagatctaaagatgttagagact

SEQ ID NO: 4188 - DNA, 23 bp, Artificial Sequence
  human ApoB siRNA sequence
agatctaaagatgttagagactg

SEQ ID NO: 4189 - DNA, 23 bp, Artificial Sequence
  human ApoB siRNA sequence
gatctaaagatgttagagactgt

SEQ ID NO: 4190 - DNA, 23 bp, Artificial Sequence
  human ApoB siRNA sequence
atctaaagatgttagagactgtt

SEQ ID NO: 4191 - DNA, 23 bp, Artificial Sequence
  human ApoB siRNA sequence
tctaaagatgttagagactgtta

SEQ ID NO: 4192 - DNA, 23 bp, Artificial Sequence
  human ApoB siRNA sequence
ctaaagatgttagagactgttag

SEQ ID NO: 4193 - DNA, 23 bp, Artificial Sequence
  human ApoB siRNA sequence
taaagatgttagagactgttagg

SEQ ID NO: 4194 - DNA, 23 bp, Artificial Sequence
  human ApoB siRNA sequence
aaagatgttagagactgttagga

SEQ ID NO: 4195 - DNA, 23 bp, Artificial Sequence
  human ApoB siRNA sequence
aagatgttagagactgttaggac

SEQ ID NO: 4196 - DNA, 23 bp, Artificial Sequence
  human ApoB siRNA sequence
agatgttagagactgttaggaca

SEQ ID NO: 4197 - DNA, 23 bp, Artificial Sequence
  human ApoB siRNA sequence
gatgttagagactgttaggacac

SEQ ID NO: 4198 - DNA, 23 bp, Artificial Sequence
  human ApoB siRNA sequence
atgttagagactgttaggacacc

SEQ ID NO: 4199 - DNA, 23 bp, Artificial Sequence
  human ApoB siRNA sequence
tgttagagactgttaggacacca

SEQ ID NO: 4200 - DNA, 23 bp, Artificial Sequence
  human ApoB siRNA sequence
gttagagactgttaggacaccag

SEQ ID NO: 4201 - DNA, 23 bp, Artificial Sequence
  human ApoB siRNA sequence
ttagagactgttaggacaccagc

SEQ ID NO: 4202 - DNA, 23 bp, Artificial Sequence
  human ApoB siRNA sequence
tagagactgttaggacaccagcc

SEQ ID NO: 4203 - DNA, 23 bp, Artificial Sequence
  human ApoB siRNA sequence
agagactgttaggacaccagccc

SEQ ID NO: 4204 - DNA, 23 bp, Artificial Sequence
  human ApoB siRNA sequence
gagactgttaggacaccagccct

SEQ ID NO: 4205 - DNA, 23 bp, Artificial Sequence
  human ApoB siRNA sequence
agactgttaggacaccagccctc

SEQ ID NO: 4206 - DNA, 23 bp, Artificial Sequence
  human ApoB siRNA sequence
gactgttaggacaccagccctcc

SEQ ID NO: 4207 - DNA, 23 bp, Artificial Sequence
  human ApoB siRNA sequence
actgttaggacaccagccctcca

SEQ ID NO: 4208 - DNA, 23 bp, Artificial Sequence
  human ApoB siRNA sequence
ctgttaggacaccagccctccac

SEQ ID NO: 4209 - DNA, 23 bp, Artificial Sequence
  human ApoB siRNA sequence
tgttaggacaccagccctccact

SEQ ID NO: 4210 - DNA, 23 bp, Artificial Sequence
  human ApoB siRNA sequence
gttaggacaccagccctccactt

SEQ ID NO: 4211 - DNA, 23 bp, Artificial Sequence
  human ApoB siRNA sequence
ttaggacaccagccctccacttc

SEQ ID NO: 4212 - DNA, 23 bp, Artificial Sequence
  human ApoB siRNA sequence
taggacaccagccctccacttca

SEQ ID NO: 4213 - DNA, 23 bp, Artificial Sequence
  human ApoB siRNA sequence
aggacaccagccctccacttcaa

SEQ ID NO: 4214 - DNA, 23 bp, Artificial Sequence
  human ApoB siRNA sequence
ggacaccagccctccacttcaag

SEQ ID NO: 4215 - DNA, 23 bp, Artificial Sequence
  human ApoB siRNA sequence
gacaccagccctccacttcaagt

SEQ ID NO: 4216 - DNA, 23 bp, Artificial Sequence
  human ApoB siRNA sequence
acaccagccctccacttcaagtc

SEQ ID NO: 4217 - DNA, 23 bp, Artificial Sequence
  human ApoB siRNA sequence
caccagccctccacttcaagtct

SEQ ID NO: 4218 - DNA, 23 bp, Artificial Sequence
  human ApoB siRNA sequence
accagccctccacttcaagtctg

SEQ ID NO: 4219 - DNA, 23 bp, Artificial Sequence
  human ApoB siRNA sequence
ccagccctccacttcaagtctgt

SEQ ID NO: 4220 - DNA, 23 bp, Artificial Sequence
  human ApoB siRNA sequence
cagccctccacttcaagtctgtg

SEQ ID NO: 4221 - DNA, 23 bp, Artificial Sequence
  human ApoB siRNA sequence
agccctccacttcaagtctgtgg

SEQ ID NO: 4222 - DNA, 23 bp, Artificial Sequence
  human ApoB siRNA sequence
gccctccacttcaagtctgtggg

SEQ ID NO: 4223 - DNA, 23 bp, Artificial Sequence
  human ApoB siRNA sequence
ccctccacttcaagtctgtggga

SEQ ID NO: 4224 - DNA, 23 bp, Artificial Sequence
  human ApoB siRNA sequence
cctccacttcaagtctgtgggat

SEQ ID NO: 4225 - DNA, 23 bp, Artificial Sequence
  human ApoB siRNA sequence
ctccacttcaagtctgtgggatt

SEQ ID NO: 4226 - DNA, 23 bp, Artificial Sequence
  human ApoB siRNA sequence
tccacttcaagtctgtgggattc

SEQ ID NO: 4227 - DNA, 23 bp, Artificial Sequence
  human ApoB siRNA sequence
ccacttcaagtctgtgggattcc

SEQ ID NO: 4228 - DNA, 23 bp, Artificial Sequence
  human ApoB siRNA sequence
cacttcaagtctgtgggattcca

SEQ ID NO: 4229 - DNA, 23 bp, Artificial Sequence
  human ApoB siRNA sequence
acttcaagtctgtgggattccat

SEQ ID NO: 4230 - DNA, 23 bp, Artificial Sequence
  human ApoB siRNA sequence
cttcaagtctgtgggattccatc

SEQ ID NO: 4231 - DNA, 23 bp, Artificial Sequence
  human ApoB siRNA sequence
ttcaagtctgtgggattccatct

SEQ ID NO: 4232 - DNA, 23 bp, Artificial Sequence
  human ApoB siRNA sequence
tcaagtctgtgggattccatctg

SEQ ID NO: 4233 - DNA, 23 bp, Artificial Sequence
  human ApoB siRNA sequence
caagtctgtgggattccatctgc

SEQ ID NO: 4234 - DNA, 23 bp, Artificial Sequence
  human ApoB siRNA sequence
aagtctgtgggattccatctgcc

SEQ ID NO: 4235 - DNA, 23 bp, Artificial Sequence
  human ApoB siRNA sequence
agtctgtgggattccatctgcca

SEQ ID NO: 4236 - DNA, 23 bp, Artificial Sequence
  human ApoB siRNA sequence
gtctgtgggattccatctgccat

SEQ ID NO: 4237 - DNA, 23 bp, Artificial Sequence
  human ApoB siRNA sequence
tctgtgggattccatctgccatc

SEQ ID NO: 4238 - DNA, 23 bp, Artificial Sequence
  human ApoB siRNA sequence
ctgtgggattccatctgccatct

SEQ ID NO: 4239 - DNA, 23 bp, Artificial Sequence
  human ApoB siRNA sequence
tgtgggattccatctgccatctc

SEQ ID NO: 4240 - DNA, 23 bp, Artificial Sequence
  human ApoB siRNA sequence
gtgggattccatctgccatctcg

SEQ ID NO: 4241 - DNA, 23 bp, Artificial Sequence
  human ApoB siRNA sequence
tgggattccatctgccatctcga

SEQ ID NO: 4242 - DNA, 23 bp, Artificial Sequence
  human ApoB siRNA sequence
gggattccatctgccatctcgag

SEQ ID NO: 4243 - DNA, 23 bp, Artificial Sequence
  human ApoB siRNA sequence
ggattccatctgccatctcgaga

SEQ ID NO: 4244 - DNA, 23 bp, Artificial Sequence
  human ApoB siRNA sequence
gattccatctgccatctcgagag

SEQ ID NO: 4245 - DNA, 23 bp, Artificial Sequence
  human ApoB siRNA sequence
attccatctgccatctcgagagt

SEQ ID NO: 4246 - DNA, 23 bp, Artificial Sequence
  human ApoB siRNA sequence
ttccatctgccatctcgagagtt

SEQ ID NO: 4247 - DNA, 23 bp, Artificial Sequence
  human ApoB siRNA sequence
tccatctgccatctcgagagttc

SEQ ID NO: 4248 - DNA, 23 bp, Artificial Sequence
  human ApoB siRNA sequence
ccatctgccatctcgagagttcc

SEQ ID NO: 4249 - DNA, 23 bp, Artificial Sequence
  human ApoB siRNA sequence
catctgccatctcgagagttcca

SEQ ID NO: 4250 - DNA, 23 bp, Artificial Sequence
  human ApoB siRNA sequence
atctgccatctcgagagttccaa

SEQ ID NO: 4251 - DNA, 23 bp, Artificial Sequence
  human ApoB siRNA sequence
tctgccatctcgagagttccaag

SEQ ID NO: 4252 - DNA, 23 bp, Artificial Sequence
  human ApoB siRNA sequence
ctgccatctcgagagttccaagt

SEQ ID NO: 4253 - DNA, 23 bp, Artificial Sequence
  human ApoB siRNA sequence
tgccatctcgagagttccaagtc

SEQ ID NO: 4254 - DNA, 23 bp, Artificial Sequence
  human ApoB siRNA sequence
gccatctcgagagttccaagtcc

SEQ ID NO: 4255 - DNA, 23 bp, Artificial Sequence
  human ApoB siRNA sequence
ccatctcgagagttccaagtccc

SEQ ID NO: 4256 - DNA, 23 bp, Artificial Sequence
  human ApoB siRNA sequence
catctcgagagttccaagtccct

SEQ ID NO: 4257 - DNA, 23 bp, Artificial Sequence
  human ApoB siRNA sequence
atctcgagagttccaagtcccta

SEQ ID NO: 4258 - DNA, 23 bp, Artificial Sequence
  human ApoB siRNA sequence
tctcgagagttccaagtccctac

SEQ ID NO: 4259 - DNA, 23 bp, Artificial Sequence
  human ApoB siRNA sequence
ctcgagagttccaagtccctact

SEQ ID NO: 4260 - DNA, 23 bp, Artificial Sequence
  human ApoB siRNA sequence
tcgagagttccaagtccctactt

SEQ ID NO: 4261 - DNA, 23 bp, Artificial Sequence
  human ApoB siRNA sequence
cgagagttccaagtccctacttt

SEQ ID NO: 4262 - DNA, 23 bp, Artificial Sequence
  human ApoB siRNA sequence
gagagttccaagtccctactttt

SEQ ID NO: 4263 - DNA, 23 bp, Artificial Sequence
  human ApoB siRNA sequence
agagttccaagtccctactttta

SEQ ID NO: 4264 - DNA, 23 bp, Artificial Sequence
  human ApoB siRNA sequence
gagttccaagtccctacttttac

SEQ ID NO: 4265 - DNA, 23 bp, Artificial Sequence
  human ApoB siRNA sequence
agttccaagtccctacttttacc

SEQ ID NO: 4266 - DNA, 23 bp, Artificial Sequence
  human ApoB siRNA sequence
gttccaagtccctacttttacca

SEQ ID NO: 4267 - DNA, 23 bp, Artificial Sequence
  human ApoB siRNA sequence
ttccaagtccctacttttaccat

SEQ ID NO: 4268 - DNA, 23 bp, Artificial Sequence
  human ApoB siRNA sequence
tccaagtccctacttttaccatt

SEQ ID NO: 4269 - DNA, 23 bp, Artificial Sequence
  human ApoB siRNA sequence
ccaagtccctacttttaccattc

SEQ ID NO: 4270 - DNA, 23 bp, Artificial Sequence
  human ApoB siRNA sequence
caagtccctacttttaccattcc

SEQ ID NO: 4271 - DNA, 23 bp, Artificial Sequence
  human ApoB siRNA sequence
aagtccctacttttaccattccc

SEQ ID NO: 4272 - DNA, 23 bp, Artificial Sequence
  human ApoB siRNA sequence
agtccctacttttaccattccca

SEQ ID NO: 4273 - DNA, 23 bp, Artificial Sequence
  human ApoB siRNA sequence
gtccctacttttaccattcccaa

SEQ ID NO: 4274 - DNA, 23 bp, Artificial Sequence
  human ApoB siRNA sequence
tccctacttttaccattcccaag

SEQ ID NO: 4275 - DNA, 23 bp, Artificial Sequence
  human ApoB siRNA sequence
ccctacttttaccattcccaagt

SEQ ID NO: 4276 - DNA, 23 bp, Artificial Sequence
  human ApoB siRNA sequence
cctacttttaccattcccaagtt

SEQ ID NO: 4277 - DNA, 23 bp, Artificial Sequence
  human ApoB siRNA sequence
ctacttttaccattcccaagttg

SEQ ID NO: 4278 - DNA, 23 bp, Artificial Sequence
  human ApoB siRNA sequence
tacttttaccattcccaagttgt

SEQ ID NO: 4279 - DNA, 23 bp, Artificial Sequence
  human ApoB siRNA sequence
acttttaccattcccaagttgta

SEQ ID NO: 4280 - DNA, 23 bp, Artificial Sequence
  human ApoB siRNA sequence
cttttaccattcccaagttgtat

SEQ ID NO: 4281 - DNA, 23 bp, Artificial Sequence
  human ApoB siRNA sequence
ttttaccattcccaagttgtatc

SEQ ID NO: 4282 - DNA, 23 bp, Artificial Sequence
  human ApoB siRNA sequence
tttaccattcccaagttgtatca

SEQ ID NO: 4283 - DNA, 23 bp, Artificial Sequence
  human ApoB siRNA sequence
ttaccattcccaagttgtatcaa

SEQ ID NO: 4284 - DNA, 23 bp, Artificial Sequence
  human ApoB siRNA sequence
taccattcccaagttgtatcaac

SEQ ID NO: 4285 - DNA, 23 bp, Artificial Sequence
  human ApoB siRNA sequence
accattcccaagttgtatcaact

SEQ ID NO: 4286 - DNA, 23 bp, Artificial Sequence
  human ApoB siRNA sequence
ccattcccaagttgtatcaactg

SEQ ID NO: 4287 - DNA, 23 bp, Artificial Sequence
  human ApoB siRNA sequence
cattcccaagttgtatcaactgc

SEQ ID NO: 4288 - DNA, 23 bp, Artificial Sequence
  human ApoB siRNA sequence
attcccaagttgtatcaactgca

SEQ ID NO: 4289 - DNA, 23 bp, Artificial Sequence
  human ApoB siRNA sequence
ttcccaagttgtatcaactgcaa

SEQ ID NO: 4290 - DNA, 23 bp, Artificial Sequence
  human ApoB siRNA sequence
tcccaagttgtatcaactgcaag

SEQ ID NO: 4291 - DNA, 23 bp, Artificial Sequence
  human ApoB siRNA sequence
cccaagttgtatcaactgcaagt

SEQ ID NO: 4292 - DNA, 23 bp, Artificial Sequence
  human ApoB siRNA sequence
ccaagttgtatcaactgcaagtg

SEQ ID NO: 4293 - DNA, 23 bp, Artificial Sequence
  human ApoB siRNA sequence
caagttgtatcaactgcaagtgc

SEQ ID NO: 4294 - DNA, 23 bp, Artificial Sequence
  human ApoB siRNA sequence
aagttgtatcaactgcaagtgcc

SEQ ID NO: 4295 - DNA, 23 bp, Artificial Sequence
  human ApoB siRNA sequence
agttgtatcaactgcaagtgcct

SEQ ID NO: 4296 - DNA, 23 bp, Artificial Sequence
  human ApoB siRNA sequence
gttgtatcaactgcaagtgcctc

SEQ ID NO: 4297 - DNA, 23 bp, Artificial Sequence
  human ApoB siRNA sequence
ttgtatcaactgcaagtgcctct

SEQ ID NO: 4298 - DNA, 23 bp, Artificial Sequence
  human ApoB siRNA sequence
tgtatcaactgcaagtgcctctc

SEQ ID NO: 4299 - DNA, 23 bp, Artificial Sequence
  human ApoB siRNA sequence
gtatcaactgcaagtgcctctcc

SEQ ID NO: 4300 - DNA, 23 bp, Artificial Sequence
  human ApoB siRNA sequence
tatcaactgcaagtgcctctcct

SEQ ID NO: 4301 - DNA, 23 bp, Artificial Sequence
  human ApoB siRNA sequence
atcaactgcaagtgcctctcctg

SEQ ID NO: 4302 - DNA, 23 bp, Artificial Sequence
  human ApoB siRNA sequence
tcaactgcaagtgcctctcctgg

SEQ ID NO: 4303 - DNA, 23 bp, Artificial Sequence
  human ApoB siRNA sequence
caactgcaagtgcctctcctggg

SEQ ID NO: 4304 - DNA, 23 bp, Artificial Sequence
  human ApoB siRNA sequence
aactgcaagtgcctctcctgggt

SEQ ID NO: 4305 - DNA, 23 bp, Artificial Sequence
  human ApoB siRNA sequence
actgcaagtgcctctcctgggtg

SEQ ID NO: 4306 - DNA, 23 bp, Artificial Sequence
  human ApoB siRNA sequence
ctgcaagtgcctctcctgggtgt

SEQ ID NO: 4307 - DNA, 23 bp, Artificial Sequence
  human ApoB siRNA sequence
tgcaagtgcctctcctgggtgtt

SEQ ID NO: 4308 - DNA, 23 bp, Artificial Sequence
  human ApoB siRNA sequence
gcaagtgcctctcctgggtgttc

SEQ ID NO: 4309 - DNA, 23 bp, Artificial Sequence
  human ApoB siRNA sequence
caagtgcctctcctgggtgttct

SEQ ID NO: 4310 - DNA, 23 bp, Artificial Sequence
  human ApoB siRNA sequence
aagtgcctctcctgggtgttcta

SEQ ID NO: 4311 - DNA, 23 bp, Artificial Sequence
  human ApoB siRNA sequence
agtgcctctcctgggtgttctag

SEQ ID NO: 4312 - DNA, 23 bp, Artificial Sequence
  human ApoB siRNA sequence
gtgcctctcctgggtgttctaga

SEQ ID NO: 4313 - DNA, 23 bp, Artificial Sequence
  human ApoB siRNA sequence
tgcctctcctgggtgttctagac

SEQ ID NO: 4314 - DNA, 23 bp, Artificial Sequence
  human ApoB siRNA sequence
gcctctcctgggtgttctagacc

SEQ ID NO: 4315 - DNA, 23 bp, Artificial Sequence
  human ApoB siRNA sequence
cctctcctgggtgttctagacct

SEQ ID NO: 4316 - DNA, 23 bp, Artificial Sequence
  human ApoB siRNA sequence
ctctcctgggtgttctagacctc

SEQ ID NO: 4317 - DNA, 23 bp, Artificial Sequence
  human ApoB siRNA sequence
tctcctgggtgttctagacctct

SEQ ID NO: 4318 - DNA, 23 bp, Artificial Sequence
  human ApoB siRNA sequence
ctcctgggtgttctagacctctc

SEQ ID NO: 4319 - DNA, 23 bp, Artificial Sequence
  human ApoB siRNA sequence
tcctgggtgttctagacctctcc

SEQ ID NO: 4320 - DNA, 23 bp, Artificial Sequence
  human ApoB siRNA sequence
cctgggtgttctagacctctcca

SEQ ID NO: 4321 - DNA, 23 bp, Artificial Sequence
  human ApoB siRNA sequence
ctgggtgttctagacctctccac

SEQ ID NO: 4322 - DNA, 23 bp, Artificial Sequence
  human ApoB siRNA sequence
tgggtgttctagacctctccacg

SEQ ID NO: 4323 - DNA, 23 bp, Artificial Sequence
  human ApoB siRNA sequence
gggtgttctagacctctccacga

SEQ ID NO: 4324 - DNA, 23 bp, Artificial Sequence
  human ApoB siRNA sequence
ggtgttctagacctctccacgaa

SEQ ID NO: 4325 - DNA, 23 bp, Artificial Sequence
  human ApoB siRNA sequence
gtgttctagacctctccacgaat

SEQ ID NO: 4326 - DNA, 23 bp, Artificial Sequence
  human ApoB siRNA sequence
tgttctagacctctccacgaatg

SEQ ID NO: 4327 - DNA, 23 bp, Artificial Sequence
  human ApoB siRNA sequence
gttctagacctctccacgaatgt

SEQ ID NO: 4328 - DNA, 23 bp, Artificial Sequence
  human ApoB siRNA sequence
ttctagacctctccacgaatgtc

SEQ ID NO: 4329 - DNA, 23 bp, Artificial Sequence
  human ApoB siRNA sequence
tctagacctctccacgaatgtct

SEQ ID NO: 4330 - DNA, 23 bp, Artificial Sequence
  human ApoB siRNA sequence
ctagacctctccacgaatgtcta

SEQ ID NO: 4331 - DNA, 23 bp, Artificial Sequence
  human ApoB siRNA sequence
tagacctctccacgaatgtctac

SEQ ID NO: 4332 - DNA, 23 bp, Artificial Sequence
  human ApoB siRNA sequence
agacctctccacgaatgtctaca

SEQ ID NO: 4333 - DNA, 23 bp, Artificial Sequence
  human ApoB siRNA sequence
gacctctccacgaatgtctacag

SEQ ID NO: 4334 - DNA, 23 bp, Artificial Sequence
  human ApoB siRNA sequence
acctctccacgaatgtctacagc

SEQ ID NO: 4335 - DNA, 23 bp, Artificial Sequence
  human ApoB siRNA sequence
cctctccacgaatgtctacagca

SEQ ID NO: 4336 - DNA, 23 bp, Artificial Sequence
  human ApoB siRNA sequence
ctctccacgaatgtctacagcaa

SEQ ID NO: 4337 - DNA, 23 bp, Artificial Sequence
  human ApoB siRNA sequence
tctccacgaatgtctacagcaac

SEQ ID NO: 4338 - DNA, 23 bp, Artificial Sequence
  human ApoB siRNA sequence
ctccacgaatgtctacagcaact

SEQ ID NO: 4339 - DNA, 23 bp, Artificial Sequence
  human ApoB siRNA sequence
tccacgaatgtctacagcaactt

SEQ ID NO: 4340 - DNA, 23 bp, Artificial Sequence
  human ApoB siRNA sequence
ccacgaatgtctacagcaacttg

SEQ ID NO: 4341 - DNA, 23 bp, Artificial Sequence
  human ApoB siRNA sequence
cacgaatgtctacagcaacttgt

SEQ ID NO: 4342 - DNA, 23 bp, Artificial Sequence
  human ApoB siRNA sequence
acgaatgtctacagcaacttgta

SEQ ID NO: 4343 - DNA, 23 bp, Artificial Sequence
  human ApoB siRNA sequence
cgaatgtctacagcaacttgtac

SEQ ID NO: 4344 - DNA, 23 bp, Artificial Sequence
  human ApoB siRNA sequence
gaatgtctacagcaacttgtaca

SEQ ID NO: 4345 - DNA, 23 bp, Artificial Sequence
  human ApoB siRNA sequence
aatgtctacagcaacttgtacaa

SEQ ID NO: 4346 - DNA, 23 bp, Artificial Sequence
  human ApoB siRNA sequence
atgtctacagcaacttgtacaac

SEQ ID NO: 4347 - DNA, 23 bp, Artificial Sequence
  human ApoB siRNA sequence
tgtctacagcaacttgtacaact

SEQ ID NO: 4348 - DNA, 23 bp, Artificial Sequence
  human ApoB siRNA sequence
gtctacagcaacttgtacaactg

SEQ ID NO: 4349 - DNA, 23 bp, Artificial Sequence
  human ApoB siRNA sequence
tctacagcaacttgtacaactgg

SEQ ID NO: 4350 - DNA, 23 bp, Artificial Sequence
  human ApoB siRNA sequence
ctacagcaacttgtacaactggt

SEQ ID NO: 4351 - DNA, 23 bp, Artificial Sequence
  human ApoB siRNA sequence
tacagcaacttgtacaactggtc

SEQ ID NO: 4352 - DNA, 23 bp, Artificial Sequence
  human ApoB siRNA sequence
acagcaacttgtacaactggtcc

SEQ ID NO: 4353 - DNA, 23 bp, Artificial Sequence
  human ApoB siRNA sequence
cagcaacttgtacaactggtccg

SEQ ID NO: 4354 - DNA, 23 bp, Artificial Sequence
  human ApoB siRNA sequence
agcaacttgtacaactggtccgc

SEQ ID NO: 4355 - DNA, 23 bp, Artificial Sequence
  human ApoB siRNA sequence
gcaacttgtacaactggtccgcc

SEQ ID NO: 4356 - DNA, 23 bp, Artificial Sequence
  human ApoB siRNA sequence
caacttgtacaactggtccgcct

SEQ ID NO: 4357 - DNA, 23 bp, Artificial Sequence
  human ApoB siRNA sequence
aacttgtacaactggtccgcctc

SEQ ID NO: 4358 - DNA, 23 bp, Artificial Sequence
  human ApoB siRNA sequence
acttgtacaactggtccgcctcc

SEQ ID NO: 4359 - DNA, 23 bp, Artificial Sequence
  human ApoB siRNA sequence
cttgtacaactggtccgcctcct

SEQ ID NO: 4360 - DNA, 23 bp, Artificial Sequence
  human ApoB siRNA sequence
ttgtacaactggtccgcctccta

SEQ ID NO: 4361 - DNA, 23 bp, Artificial Sequence
  human ApoB siRNA sequence
tgtacaactggtccgcctcctac

SEQ ID NO: 4362 - DNA, 23 bp, Artificial Sequence
  human ApoB siRNA sequence
gtacaactggtccgcctcctaca

SEQ ID NO: 4363 - DNA, 23 bp, Artificial Sequence
  human ApoB siRNA sequence
tacaactggtccgcctcctacag

SEQ ID NO: 4364 - DNA, 23 bp, Artificial Sequence
  human ApoB siRNA sequence
acaactggtccgcctcctacagt

SEQ ID NO: 4365 - DNA, 23 bp, Artificial Sequence
  human ApoB siRNA sequence
caactggtccgcctcctacagtg

SEQ ID NO: 4366 - DNA, 23 bp, Artificial Sequence
  human ApoB siRNA sequence
aactggtccgcctcctacagtgg

SEQ ID NO: 4367 - DNA, 23 bp, Artificial Sequence
  human ApoB siRNA sequence
actggtccgcctcctacagtggt

SEQ ID NO: 4368 - DNA, 23 bp, Artificial Sequence
  human ApoB siRNA sequence
ctggtccgcctcctacagtggtg

SEQ ID NO: 4369 - DNA, 23 bp, Artificial Sequence
  human ApoB siRNA sequence
tggtccgcctcctacagtggtgg

SEQ ID NO: 4370 - DNA, 23 bp, Artificial Sequence
  human ApoB siRNA sequence
ggtccgcctcctacagtggtggc

SEQ ID NO: 4371 - DNA, 23 bp, Artificial Sequence
  human ApoB siRNA sequence
gtccgcctcctacagtggtggca

SEQ ID NO: 4372 - DNA, 23 bp, Artificial Sequence
  human ApoB siRNA sequence
tccgcctcctacagtggtggcaa

SEQ ID NO: 4373 - DNA, 23 bp, Artificial Sequence
  human ApoB siRNA sequence
ccgcctcctacagtggtggcaac

SEQ ID NO: 4374 - DNA, 23 bp, Artificial Sequence
  human ApoB siRNA sequence
cgcctcctacagtggtggcaaca

SEQ ID NO: 4375 - DNA, 23 bp, Artificial Sequence
  human ApoB siRNA sequence
gcctcctacagtggtggcaacac

SEQ ID NO: 4376 - DNA, 23 bp, Artificial Sequence
  human ApoB siRNA sequence
cctcctacagtggtggcaacacc

SEQ ID NO: 4377 - DNA, 23 bp, Artificial Sequence
  human ApoB siRNA sequence
ctcctacagtggtggcaacacca

SEQ ID NO: 4378 - DNA, 23 bp, Artificial Sequence
  human ApoB siRNA sequence
tcctacagtggtggcaacaccag

SEQ ID NO: 4379 - DNA, 23 bp, Artificial Sequence
  human ApoB siRNA sequence
cctacagtggtggcaacaccagc

SEQ ID NO: 4380 - DNA, 23 bp, Artificial Sequence
  human ApoB siRNA sequence
ctacagtggtggcaacaccagca

SEQ ID NO: 4381 - DNA, 23 bp, Artificial Sequence
  human ApoB siRNA sequence
tacagtggtggcaacaccagcac

SEQ ID NO: 4382 - DNA, 23 bp, Artificial Sequence
  human ApoB siRNA sequence
acagtggtggcaacaccagcaca

SEQ ID NO: 4383 - DNA, 23 bp, Artificial Sequence
  human ApoB siRNA sequence
cagtggtggcaacaccagcacag

SEQ ID NO: 4384 - DNA, 23 bp, Artificial Sequence
  human ApoB siRNA sequence
agtggtggcaacaccagcacaga

SEQ ID NO: 4385 - DNA, 23 bp, Artificial Sequence
  human ApoB siRNA sequence
gtggtggcaacaccagcacagac

SEQ ID NO: 4386 - DNA, 23 bp, Artificial Sequence
  human ApoB siRNA sequence
tggtggcaacaccagcacagacc

SEQ ID NO: 4387 - DNA, 23 bp, Artificial Sequence
  human ApoB siRNA sequence
ggtggcaacaccagcacagacca

SEQ ID NO: 4388 - DNA, 23 bp, Artificial Sequence
  human ApoB siRNA sequence
gtggcaacaccagcacagaccat

SEQ ID NO: 4389 - DNA, 23 bp, Artificial Sequence
  human ApoB siRNA sequence
tggcaacaccagcacagaccatt

SEQ ID NO: 4390 - DNA, 23 bp, Artificial Sequence
  human ApoB siRNA sequence
ggcaacaccagcacagaccattt

SEQ ID NO: 4391 - DNA, 23 bp, Artificial Sequence
  human ApoB siRNA sequence
gcaacaccagcacagaccatttc

SEQ ID NO: 4392 - DNA, 23 bp, Artificial Sequence
  human ApoB siRNA sequence
caacaccagcacagaccatttca

SEQ ID NO: 4393 - DNA, 23 bp, Artificial Sequence
  human ApoB siRNA sequence
aacaccagcacagaccatttcag

SEQ ID NO: 4394 - DNA, 23 bp, Artificial Sequence
  human ApoB siRNA sequence
acaccagcacagaccatttcagc

SEQ ID NO: 4395 - DNA, 23 bp, Artificial Sequence
  human ApoB siRNA sequence
caccagcacagaccatttcagcc

SEQ ID NO: 4396 - DNA, 23 bp, Artificial Sequence
  human ApoB siRNA sequence
accagcacagaccatttcagcct

SEQ ID NO: 4397 - DNA, 23 bp, Artificial Sequence
  human ApoB siRNA sequence
ccagcacagaccatttcagcctt

SEQ ID NO: 4398 - DNA, 23 bp, Artificial Sequence
  human ApoB siRNA sequence
cagcacagaccatttcagccttc

SEQ ID NO: 4399 - DNA, 23 bp, Artificial Sequence
  human ApoB siRNA sequence
agcacagaccatttcagccttcg

SEQ ID NO: 4400 - DNA, 23 bp, Artificial Sequence
  human ApoB siRNA sequence
gcacagaccatttcagccttcgg

SEQ ID NO: 4401 - DNA, 23 bp, Artificial Sequence
  human ApoB siRNA sequence
cacagaccatttcagccttcggg

SEQ ID NO: 4402 - DNA, 23 bp, Artificial Sequence
  human ApoB siRNA sequence
acagaccatttcagccttcgggc

SEQ ID NO: 4403 - DNA, 23 bp, Artificial Sequence
  human ApoB siRNA sequence
cagaccatttcagccttcgggct

SEQ ID NO: 4404 - DNA, 23 bp, Artificial Sequence
  human ApoB siRNA sequence
agaccatttcagccttcgggctc

SEQ ID NO: 4405 - DNA, 23 bp, Artificial Sequence
  human ApoB siRNA sequence
gaccatttcagccttcgggctcg

SEQ ID NO: 4406 - DNA, 23 bp, Artificial Sequence
  human ApoB siRNA sequence
accatttcagccttcgggctcgt

SEQ ID NO: 4407 - DNA, 23 bp, Artificial Sequence
  human ApoB siRNA sequence
ccatttcagccttcgggctcgtt

SEQ ID NO: 4408 - DNA, 23 bp, Artificial Sequence
  human ApoB siRNA sequence
catttcagccttcgggctcgtta

SEQ ID NO: 4409 - DNA, 23 bp, Artificial Sequence
  human ApoB siRNA sequence
atttcagccttcgggctcgttac

SEQ ID NO: 4410 - DNA, 23 bp, Artificial Sequence
  human ApoB siRNA sequence
tttcagccttcgggctcgttacc

SEQ ID NO: 4411 - DNA, 23 bp, Artificial Sequence
  human ApoB siRNA sequence
ttcagccttcgggctcgttacca

SEQ ID NO: 4412 - DNA, 23 bp, Artificial Sequence
  human ApoB siRNA sequence
tcagccttcgggctcgttaccac

SEQ ID NO: 4413 - DNA, 23 bp, Artificial Sequence
  human ApoB siRNA sequence
cagccttcgggctcgttaccaca

SEQ ID NO: 4414 - DNA, 23 bp, Artificial Sequence
  human ApoB siRNA sequence
agccttcgggctcgttaccacat

SEQ ID NO: 4415 - DNA, 23 bp, Artificial Sequence
  human ApoB siRNA sequence
gccttcgggctcgttaccacatg

SEQ ID NO: 4416 - DNA, 23 bp, Artificial Sequence
  human ApoB siRNA sequence
ccttcgggctcgttaccacatga

SEQ ID NO: 4417 - DNA, 23 bp, Artificial Sequence
  human ApoB siRNA sequence
cttcgggctcgttaccacatgaa

SEQ ID NO: 4418 - DNA, 23 bp, Artificial Sequence
  human ApoB siRNA sequence
ttcgggctcgttaccacatgaag

SEQ ID NO: 4419 - DNA, 23 bp, Artificial Sequence
  human ApoB siRNA sequence
tcgggctcgttaccacatgaagg

SEQ ID NO: 4420 - DNA, 23 bp, Artificial Sequence
  human ApoB siRNA sequence
cgggctcgttaccacatgaaggc

SEQ ID NO: 4421 - DNA, 23 bp, Artificial Sequence
  human ApoB siRNA sequence
gggctcgttaccacatgaaggct

SEQ ID NO: 4422 - DNA, 23 bp, Artificial Sequence
  human ApoB siRNA sequence
ggctcgttaccacatgaaggctg

SEQ ID NO: 4423 - DNA, 23 bp, Artificial Sequence
  human ApoB siRNA sequence
gctcgttaccacatgaaggctga

SEQ ID NO: 4424 - DNA, 23 bp, Artificial Sequence
  human ApoB siRNA sequence
ctcgttaccacatgaaggctgac

SEQ ID NO: 4425 - DNA, 23 bp, Artificial Sequence
  human ApoB siRNA sequence
tcgttaccacatgaaggctgact

SEQ ID NO: 4426 - DNA, 23 bp, Artificial Sequence
  human ApoB siRNA sequence
cgttaccacatgaaggctgactc

SEQ ID NO: 4427 - DNA, 23 bp, Artificial Sequence
  human ApoB siRNA sequence
gttaccacatgaaggctgactct

SEQ ID NO: 4428 - DNA, 23 bp, Artificial Sequence
  human ApoB siRNA sequence
ttaccacatgaaggctgactctg

SEQ ID NO: 4429 - DNA, 23 bp, Artificial Sequence
  human ApoB siRNA sequence
taccacatgaaggctgactctgt

SEQ ID NO: 4430 - DNA, 23 bp, Artificial Sequence
  human ApoB siRNA sequence
accacatgaaggctgactctgtg

SEQ ID NO: 4431 - DNA, 23 bp, Artificial Sequence
  human ApoB siRNA sequence
ccacatgaaggctgactctgtgg

SEQ ID NO: 4432 - DNA, 23 bp, Artificial Sequence
  human ApoB siRNA sequence
cacatgaaggctgactctgtggt

SEQ ID NO: 4433 - DNA, 23 bp, Artificial Sequence
  human ApoB siRNA sequence
acatgaaggctgactctgtggtt

SEQ ID NO: 4434 - DNA, 23 bp, Artificial Sequence
  human ApoB siRNA sequence
catgaaggctgactctgtggttg

SEQ ID NO: 4435 - DNA, 23 bp, Artificial Sequence
  human ApoB siRNA sequence
atgaaggctgactctgtggttga

SEQ ID NO: 4436 - DNA, 23 bp, Artificial Sequence
  human ApoB siRNA sequence
tgaaggctgactctgtggttgac

SEQ ID NO: 4437 - DNA, 23 bp, Artificial Sequence
  human ApoB siRNA sequence
gaaggctgactctgtggttgacc

SEQ ID NO: 4438 - DNA, 23 bp, Artificial Sequence
  human ApoB siRNA sequence
aaggctgactctgtggttgacct

SEQ ID NO: 4439 - DNA, 23 bp, Artificial Sequence
  human ApoB siRNA sequence
aggctgactctgtggttgacctg

SEQ ID NO: 4440 - DNA, 23 bp, Artificial Sequence
  human ApoB siRNA sequence
ggctgactctgtggttgacctgc

SEQ ID NO: 4441 - DNA, 23 bp, Artificial Sequence
  human ApoB siRNA sequence
gctgactctgtggttgacctgct

SEQ ID NO: 4442 - DNA, 23 bp, Artificial Sequence
  human ApoB siRNA sequence
ctgactctgtggttgacctgctt

SEQ ID NO: 4443 - DNA, 23 bp, Artificial Sequence
  human ApoB siRNA sequence
tgactctgtggttgacctgcttt

SEQ ID NO: 4444 - DNA, 23 bp, Artificial Sequence
  human ApoB siRNA sequence
gactctgtggttgacctgctttc

SEQ ID NO: 4445 - DNA, 23 bp, Artificial Sequence
  human ApoB siRNA sequence
actctgtggttgacctgctttcc

SEQ ID NO: 4446 - DNA, 23 bp, Artificial Sequence
  human ApoB siRNA sequence
ctctgtggttgacctgctttcct

SEQ ID NO: 4447 - DNA, 23 bp, Artificial Sequence
  human ApoB siRNA sequence
tctgtggttgacctgctttccta

SEQ ID NO: 4448 - DNA, 23 bp, Artificial Sequence
  human ApoB siRNA sequence
ctgtggttgacctgctttcctac

SEQ ID NO: 4449 - DNA, 23 bp, Artificial Sequence
  human ApoB siRNA sequence
tgtggttgacctgctttcctaca

SEQ ID NO: 4450 - DNA, 23 bp, Artificial Sequence
  human ApoB siRNA sequence
gtggttgacctgctttcctacaa

SEQ ID NO: 4451 - DNA, 23 bp, Artificial Sequence
  human ApoB siRNA sequence
tggttgacctgctttcctacaat

SEQ ID NO: 4452 - DNA, 23 bp, Artificial Sequence
  human ApoB siRNA sequence
ggttgacctgctttcctacaatg

SEQ ID NO: 4453 - DNA, 23 bp, Artificial Sequence
  human ApoB siRNA sequence
gttgacctgctttcctacaatgt

SEQ ID NO: 4454 - DNA, 23 bp, Artificial Sequence
  human ApoB siRNA sequence
ttgacctgctttcctacaatgtg

SEQ ID NO: 4455 - DNA, 23 bp, Artificial Sequence
  human ApoB siRNA sequence
tgacctgctttcctacaatgtgc

SEQ ID NO: 4456 - DNA, 23 bp, Artificial Sequence
  human ApoB siRNA sequence
gacctgctttcctacaatgtgca

SEQ ID NO: 4457 - DNA, 23 bp, Artificial Sequence
  human ApoB siRNA sequence
acctgctttcctacaatgtgcaa

SEQ ID NO: 4458 - DNA, 23 bp, Artificial Sequence
  human ApoB siRNA sequence
cctgctttcctacaatgtgcaag

SEQ ID NO: 4459 - DNA, 23 bp, Artificial Sequence
  human ApoB siRNA sequence
ctgctttcctacaatgtgcaagg

SEQ ID NO: 4460 - DNA, 23 bp, Artificial Sequence
  human ApoB siRNA sequence
tgctttcctacaatgtgcaagga

SEQ ID NO: 4461 - DNA, 23 bp, Artificial Sequence
  human ApoB siRNA sequence
gctttcctacaatgtgcaaggat

SEQ ID NO: 4462 - DNA, 23 bp, Artificial Sequence
  human ApoB siRNA sequence
ctttcctacaatgtgcaaggatc

SEQ ID NO: 4463 - DNA, 23 bp, Artificial Sequence
  human ApoB siRNA sequence
tttcctacaatgtgcaaggatct

SEQ ID NO: 4464 - DNA, 23 bp, Artificial Sequence
  human ApoB siRNA sequence
ttcctacaatgtgcaaggatctg

SEQ ID NO: 4465 - DNA, 23 bp, Artificial Sequence
  human ApoB siRNA sequence
tcctacaatgtgcaaggatctgg

SEQ ID NO: 4466 - DNA, 23 bp, Artificial Sequence
  human ApoB siRNA sequence
cctacaatgtgcaaggatctgga

SEQ ID NO: 4467 - DNA, 23 bp, Artificial Sequence
  human ApoB siRNA sequence
ctacaatgtgcaaggatctggag

SEQ ID NO: 4468 - DNA, 23 bp, Artificial Sequence
  human ApoB siRNA sequence
tacaatgtgcaaggatctggaga

SEQ ID NO: 4469 - DNA, 23 bp, Artificial Sequence
  human ApoB siRNA sequence
acaatgtgcaaggatctggagaa

SEQ ID NO: 4470 - DNA, 23 bp, Artificial Sequence
  human ApoB siRNA sequence
caatgtgcaaggatctggagaaa

SEQ ID NO: 4471 - DNA, 23 bp, Artificial Sequence
  human ApoB siRNA sequence
aatgtgcaaggatctggagaaac

SEQ ID NO: 4472 - DNA, 23 bp, Artificial Sequence
  human ApoB siRNA sequence
atgtgcaaggatctggagaaaca

SEQ ID NO: 4473 - DNA, 23 bp, Artificial Sequence
  human ApoB siRNA sequence
tgtgcaaggatctggagaaacaa

SEQ ID NO: 4474 - DNA, 23 bp, Artificial Sequence
  human ApoB siRNA sequence
gtgcaaggatctggagaaacaac

SEQ ID NO: 4475 - DNA, 23 bp, Artificial Sequence
  human ApoB siRNA sequence
tgcaaggatctggagaaacaaca

SEQ ID NO: 4476 - DNA, 23 bp, Artificial Sequence
  human ApoB siRNA sequence
gcaaggatctggagaaacaacat

SEQ ID NO: 4477 - DNA, 23 bp, Artificial Sequence
  human ApoB siRNA sequence
caaggatctggagaaacaacata

SEQ ID NO: 4478 - DNA, 23 bp, Artificial Sequence
  human ApoB siRNA sequence
aaggatctggagaaacaacatat

SEQ ID NO: 4479 - DNA, 23 bp, Artificial Sequence
  human ApoB siRNA sequence
aggatctggagaaacaacatatg

SEQ ID NO: 4480 - DNA, 23 bp, Artificial Sequence
  human ApoB siRNA sequence
ggatctggagaaacaacatatga

SEQ ID NO: 4481 - DNA, 23 bp, Artificial Sequence
  human ApoB siRNA sequence
gatctggagaaacaacatatgac

SEQ ID NO: 4482 - DNA, 23 bp, Artificial Sequence
  human ApoB siRNA sequence
atctggagaaacaacatatgacc

SEQ ID NO: 4483 - DNA, 23 bp, Artificial Sequence
  human ApoB siRNA sequence
tctggagaaacaacatatgacca

SEQ ID NO: 4484 - DNA, 23 bp, Artificial Sequence
  human ApoB siRNA sequence
ctggagaaacaacatatgaccac

SEQ ID NO: 4485 - DNA, 23 bp, Artificial Sequence
  human ApoB siRNA sequence
tggagaaacaacatatgaccaca

SEQ ID NO: 4486 - DNA, 23 bp, Artificial Sequence
  human ApoB siRNA sequence
ggagaaacaacatatgaccacaa

SEQ ID NO: 4487 - DNA, 23 bp, Artificial Sequence
  human ApoB siRNA sequence
gagaaacaacatatgaccacaag

SEQ ID NO: 4488 - DNA, 23 bp, Artificial Sequence
  human ApoB siRNA sequence
agaaacaacatatgaccacaaga

SEQ ID NO: 4489 - DNA, 23 bp, Artificial Sequence
  human ApoB siRNA sequence
gaaacaacatatgaccacaagaa

SEQ ID NO: 4490 - DNA, 23 bp, Artificial Sequence
  human ApoB siRNA sequence
aaacaacatatgaccacaagaat

SEQ ID NO: 4491 - DNA, 23 bp, Artificial Sequence
  human ApoB siRNA sequence
aacaacatatgaccacaagaata

SEQ ID NO: 4492 - DNA, 23 bp, Artificial Sequence
  human ApoB siRNA sequence
acaacatatgaccacaagaatac

SEQ ID NO: 4493 - DNA, 23 bp, Artificial Sequence
  human ApoB siRNA sequence
caacatatgaccacaagaatacg

SEQ ID NO: 4494 - DNA, 23 bp, Artificial Sequence
  human ApoB siRNA sequence
aacatatgaccacaagaatacgt

SEQ ID NO: 4495 - DNA, 23 bp, Artificial Sequence
  human ApoB siRNA sequence
acatatgaccacaagaatacgtt

SEQ ID NO: 4496 - DNA, 23 bp, Artificial Sequence
  human ApoB siRNA sequence
catatgaccacaagaatacgttc

SEQ ID NO: 4497 - DNA, 23 bp, Artificial Sequence
  human ApoB siRNA sequence
atatgaccacaagaatacgttca

SEQ ID NO: 4498 - DNA, 23 bp, Artificial Sequence
  human ApoB siRNA sequence
tatgaccacaagaatacgttcac

SEQ ID NO: 4499 - DNA, 23 bp, Artificial Sequence
  human ApoB siRNA sequence
atgaccacaagaatacgttcaca

SEQ ID NO: 4500 - DNA, 23 bp, Artificial Sequence
  human ApoB siRNA sequence
tgaccacaagaatacgttcacac

SEQ ID NO: 4501 - DNA, 23 bp, Artificial Sequence
  human ApoB siRNA sequence
gaccacaagaatacgttcacact

SEQ ID NO: 4502 - DNA, 23 bp, Artificial Sequence
  human ApoB siRNA sequence
accacaagaatacgttcacacta

SEQ ID NO: 4503 - DNA, 23 bp, Artificial Sequence
  human ApoB siRNA sequence
ccacaagaatacgttcacactat

SEQ ID NO: 4504 - DNA, 23 bp, Artificial Sequence
  human ApoB siRNA sequence
cacaagaatacgttcacactatc

SEQ ID NO: 4505 - DNA, 23 bp, Artificial Sequence
  human ApoB siRNA sequence
acaagaatacgttcacactatca

SEQ ID NO: 4506 - DNA, 23 bp, Artificial Sequence
  human ApoB siRNA sequence
caagaatacgttcacactatcat

SEQ ID NO: 4507 - DNA, 23 bp, Artificial Sequence
  human ApoB siRNA sequence
aagaatacgttcacactatcatg

SEQ ID NO: 4508 - DNA, 23 bp, Artificial Sequence
  human ApoB siRNA sequence
agaatacgttcacactatcatgt

SEQ ID NO: 4509 - DNA, 23 bp, Artificial Sequence
  human ApoB siRNA sequence
gaatacgttcacactatcatgtg

SEQ ID NO: 4510 - DNA, 23 bp, Artificial Sequence
  human ApoB siRNA sequence
aatacgttcacactatcatgtga

SEQ ID NO: 4511 - DNA, 23 bp, Artificial Sequence
  human ApoB siRNA sequence
atacgttcacactatcatgtgat

SEQ ID NO: 4512 - DNA, 23 bp, Artificial Sequence
  human ApoB siRNA sequence
tacgttcacactatcatgtgatg

SEQ ID NO: 4513 - DNA, 23 bp, Artificial Sequence
  human ApoB siRNA sequence
acgttcacactatcatgtgatgg

SEQ ID NO: 4514 - DNA, 23 bp, Artificial Sequence
  human ApoB siRNA sequence
cgttcacactatcatgtgatggg

SEQ ID NO: 4515 - DNA, 23 bp, Artificial Sequence
  human ApoB siRNA sequence
gttcacactatcatgtgatgggt

SEQ ID NO: 4516 - DNA, 23 bp, Artificial Sequence
  human ApoB siRNA sequence
ttcacactatcatgtgatgggtc

SEQ ID NO: 4517 - DNA, 23 bp, Artificial Sequence
  human ApoB siRNA sequence
tcacactatcatgtgatgggtct

SEQ ID NO: 4518 - DNA, 23 bp, Artificial Sequence
  human ApoB siRNA sequence
cacactatcatgtgatgggtctc

SEQ ID NO: 4519 - DNA, 23 bp, Artificial Sequence
  human ApoB siRNA sequence
acactatcatgtgatgggtctct

SEQ ID NO: 4520 - DNA, 23 bp, Artificial Sequence
  human ApoB siRNA sequence
cactatcatgtgatgggtctcta

SEQ ID NO: 4521 - DNA, 23 bp, Artificial Sequence
  human ApoB siRNA sequence
actatcatgtgatgggtctctac

SEQ ID NO: 4522 - DNA, 23 bp, Artificial Sequence
  human ApoB siRNA sequence
ctatcatgtgatgggtctctacg

SEQ ID NO: 4523 - DNA, 23 bp, Artificial Sequence
  human ApoB siRNA sequence
tatcatgtgatgggtctctacgc

SEQ ID NO: 4524 - DNA, 23 bp, Artificial Sequence
  human ApoB siRNA sequence
atcatgtgatgggtctctacgcc

SEQ ID NO: 4525 - DNA, 23 bp, Artificial Sequence
  human ApoB siRNA sequence
tcatgtgatgggtctctacgcca

SEQ ID NO: 4526 - DNA, 23 bp, Artificial Sequence
  human ApoB siRNA sequence
catgtgatgggtctctacgccac

SEQ ID NO: 4527 - DNA, 23 bp, Artificial Sequence
  human ApoB siRNA sequence
atgtgatgggtctctacgccaca

SEQ ID NO: 4528 - DNA, 23 bp, Artificial Sequence
  human ApoB siRNA sequence
tgtgatgggtctctacgccacaa

SEQ ID NO: 4529 - DNA, 23 bp, Artificial Sequence
  human ApoB siRNA sequence
gtgatgggtctctacgccacaaa

SEQ ID NO: 4530 - DNA, 23 bp, Artificial Sequence
  human ApoB siRNA sequence
tgatgggtctctacgccacaaat

SEQ ID NO: 4531 - DNA, 23 bp, Artificial Sequence
  human ApoB siRNA sequence
gatgggtctctacgccacaaatt

SEQ ID NO: 4532 - DNA, 23 bp, Artificial Sequence
  human ApoB siRNA sequence
atgggtctctacgccacaaattt

SEQ ID NO: 4533 - DNA, 23 bp, Artificial Sequence
  human ApoB siRNA sequence
tgggtctctacgccacaaatttc

SEQ ID NO: 4534 - DNA, 23 bp, Artificial Sequence
  human ApoB siRNA sequence
gggtctctacgccacaaatttct

SEQ ID NO: 4535 - DNA, 23 bp, Artificial Sequence
  human ApoB siRNA sequence
ggtctctacgccacaaatttcta

SEQ ID NO: 4536 - DNA, 23 bp, Artificial Sequence
  human ApoB siRNA sequence
gtctctacgccacaaatttctag

SEQ ID NO: 4537 - DNA, 23 bp, Artificial Sequence
  human ApoB siRNA sequence
tctctacgccacaaatttctaga

SEQ ID NO: 4538 - DNA, 23 bp, Artificial Sequence
  human ApoB siRNA sequence
ctctacgccacaaatttctagat

SEQ ID NO: 4539 - DNA, 23 bp, Artificial Sequence
  human ApoB siRNA sequence
tctacgccacaaatttctagatt

SEQ ID NO: 4540 - DNA, 23 bp, Artificial Sequence
  human ApoB siRNA sequence
ctacgccacaaatttctagattc

SEQ ID NO: 4541 - DNA, 23 bp, Artificial Sequence
  human ApoB siRNA sequence
tacgccacaaatttctagattcg

SEQ ID NO: 4542 - DNA, 23 bp, Artificial Sequence
  human ApoB siRNA sequence
acgccacaaatttctagattcga

SEQ ID NO: 4543 - DNA, 23 bp, Artificial Sequence
  human ApoB siRNA sequence
cgccacaaatttctagattcgaa

SEQ ID NO: 4544 - DNA, 23 bp, Artificial Sequence
  human ApoB siRNA sequence
gccacaaatttctagattcgaat

SEQ ID NO: 4545 - DNA, 23 bp, Artificial Sequence
  human ApoB siRNA sequence
ccacaaatttctagattcgaata

SEQ ID NO: 4546 - DNA, 23 bp, Artificial Sequence
  human ApoB siRNA sequence
cacaaatttctagattcgaatat

SEQ ID NO: 4547 - DNA, 23 bp, Artificial Sequence
  human ApoB siRNA sequence
acaaatttctagattcgaatatc

SEQ ID NO: 4548 - DNA, 23 bp, Artificial Sequence
  human ApoB siRNA sequence
caaatttctagattcgaatatca

SEQ ID NO: 4549 - DNA, 23 bp, Artificial Sequence
  human ApoB siRNA sequence
aaatttctagattcgaatatcaa

SEQ ID NO: 4550 - DNA, 23 bp, Artificial Sequence
  human ApoB siRNA sequence
aatttctagattcgaatatcaaa

SEQ ID NO: 4551 - DNA, 23 bp, Artificial Sequence
  human ApoB siRNA sequence
atttctagattcgaatatcaaat

SEQ ID NO: 4552 - DNA, 23 bp, Artificial Sequence
  human ApoB siRNA sequence
tttctagattcgaatatcaaatt

SEQ ID NO: 4553 - DNA, 23 bp, Artificial Sequence
  human ApoB siRNA sequence
ttctagattcgaatatcaaattc

SEQ ID NO: 4554 - DNA, 23 bp, Artificial Sequence
  human ApoB siRNA sequence
tctagattcgaatatcaaattca

SEQ ID NO: 4555 - DNA, 23 bp, Artificial Sequence
  human ApoB siRNA sequence
ctagattcgaatatcaaattcag

SEQ ID NO: 4556 - DNA, 23 bp, Artificial Sequence
  human ApoB siRNA sequence
tagattcgaatatcaaattcagt

SEQ ID NO: 4557 - DNA, 23 bp, Artificial Sequence
  human ApoB siRNA sequence
agattcgaatatcaaattcagtc

SEQ ID NO: 4558 - DNA, 23 bp, Artificial Sequence
  human ApoB siRNA sequence
gattcgaatatcaaattcagtca

SEQ ID NO: 4559 - DNA, 23 bp, Artificial Sequence
  human ApoB siRNA sequence
attcgaatatcaaattcagtcat

SEQ ID NO: 4560 - DNA, 23 bp, Artificial Sequence
  human ApoB siRNA sequence
ttcgaatatcaaattcagtcatg

SEQ ID NO: 4561 - DNA, 23 bp, Artificial Sequence
  human ApoB siRNA sequence
tcgaatatcaaattcagtcatgt

SEQ ID NO: 4562 - DNA, 23 bp, Artificial Sequence
  human ApoB siRNA sequence
cgaatatcaaattcagtcatgta

SEQ ID NO: 4563 - DNA, 23 bp, Artificial Sequence
  human ApoB siRNA sequence
gaatatcaaattcagtcatgtag

SEQ ID NO: 4564 - DNA, 23 bp, Artificial Sequence
  human ApoB siRNA sequence
aatatcaaattcagtcatgtaga

SEQ ID NO: 4565 - DNA, 23 bp, Artificial Sequence
  human ApoB siRNA sequence
atatcaaattcagtcatgtagaa

SEQ ID NO: 4566 - DNA, 23 bp, Artificial Sequence
  human ApoB siRNA sequence
tatcaaattcagtcatgtagaaa

SEQ ID NO: 4567 - DNA, 23 bp, Artificial Sequence
  human ApoB siRNA sequence
atcaaattcagtcatgtagaaaa

SEQ ID NO: 4568 - DNA, 23 bp, Artificial Sequence
  human ApoB siRNA sequence
tcaaattcagtcatgtagaaaaa

SEQ ID NO: 4569 - DNA, 23 bp, Artificial Sequence
  human ApoB siRNA sequence
caaattcagtcatgtagaaaaac

SEQ ID NO: 4570 - DNA, 23 bp, Artificial Sequence
  human ApoB siRNA sequence
aaattcagtcatgtagaaaaact

SEQ ID NO: 4571 - DNA, 23 bp, Artificial Sequence
  human ApoB siRNA sequence
aattcagtcatgtagaaaaactt

SEQ ID NO: 4572 - DNA, 23 bp, Artificial Sequence
  human ApoB siRNA sequence
attcagtcatgtagaaaaacttg

SEQ ID NO: 4573 - DNA, 23 bp, Artificial Sequence
  human ApoB siRNA sequence
ttcagtcatgtagaaaaacttgg

SEQ ID NO: 4574 - DNA, 23 bp, Artificial Sequence
  human ApoB siRNA sequence
tcagtcatgtagaaaaacttgga

SEQ ID NO: 4575 - DNA, 23 bp, Artificial Sequence
  human ApoB siRNA sequence
cagtcatgtagaaaaacttggaa

SEQ ID NO: 4576 - DNA, 23 bp, Artificial Sequence
  human ApoB siRNA sequence
agtcatgtagaaaaacttggaaa

SEQ ID NO: 4577 - DNA, 23 bp, Artificial Sequence
  human ApoB siRNA sequence
gtcatgtagaaaaacttggaaac

SEQ ID NO: 4578 - DNA, 23 bp, Artificial Sequence
  human ApoB siRNA sequence
tcatgtagaaaaacttggaaaca

SEQ ID NO: 4579 - DNA, 23 bp, Artificial Sequence
  human ApoB siRNA sequence
catgtagaaaaacttggaaacaa

SEQ ID NO: 4580 - DNA, 23 bp, Artificial Sequence
  human ApoB siRNA sequence
atgtagaaaaacttggaaacaac

SEQ ID NO: 4581 - DNA, 23 bp, Artificial Sequence
  human ApoB siRNA sequence
tgtagaaaaacttggaaacaacc

SEQ ID NO: 4582 - DNA, 23 bp, Artificial Sequence
  human ApoB siRNA sequence
gtagaaaaacttggaaacaaccc

SEQ ID NO: 4583 - DNA, 23 bp, Artificial Sequence
  human ApoB siRNA sequence
tagaaaaacttggaaacaaccca

SEQ ID NO: 4584 - DNA, 23 bp, Artificial Sequence
  human ApoB siRNA sequence
agaaaaacttggaaacaacccag

SEQ ID NO: 4585 - DNA, 23 bp, Artificial Sequence
  human ApoB siRNA sequence
gaaaaacttggaaacaacccagt

SEQ ID NO: 4586 - DNA, 23 bp, Artificial Sequence
  human ApoB siRNA sequence
aaaaacttggaaacaacccagtc

SEQ ID NO: 4587 - DNA, 23 bp, Artificial Sequence
  human ApoB siRNA sequence
aaaacttggaaacaacccagtct

SEQ ID NO: 4588 - DNA, 23 bp, Artificial Sequence
  human ApoB siRNA sequence
aaacttggaaacaacccagtctc

SEQ ID NO: 4589 - DNA, 23 bp, Artificial Sequence
  human ApoB siRNA sequence
aacttggaaacaacccagtctca

SEQ ID NO: 4590 - DNA, 23 bp, Artificial Sequence
  human ApoB siRNA sequence
acttggaaacaacccagtctcaa

SEQ ID NO: 4591 - DNA, 23 bp, Artificial Sequence
  human ApoB siRNA sequence
cttggaaacaacccagtctcaaa

SEQ ID NO: 4592 - DNA, 23 bp, Artificial Sequence
  human ApoB siRNA sequence
ttggaaacaacccagtctcaaaa

SEQ ID NO: 4593 - DNA, 23 bp, Artificial Sequence
  human ApoB siRNA sequence
tggaaacaacccagtctcaaaag

SEQ ID NO: 4594 - DNA, 23 bp, Artificial Sequence
  human ApoB siRNA sequence
ggaaacaacccagtctcaaaagg

SEQ ID NO: 4595 - DNA, 23 bp, Artificial Sequence
  human ApoB siRNA sequence
gaaacaacccagtctcaaaaggt

SEQ ID NO: 4596 - DNA, 23 bp, Artificial Sequence
  human ApoB siRNA sequence
aaacaacccagtctcaaaaggtt

SEQ ID NO: 4597 - DNA, 23 bp, Artificial Sequence
  human ApoB siRNA sequence
aacaacccagtctcaaaaggttt

SEQ ID NO: 4598 - DNA, 23 bp, Artificial Sequence
  human ApoB siRNA sequence
acaacccagtctcaaaaggttta

SEQ ID NO: 4599 - DNA, 23 bp, Artificial Sequence
  human ApoB siRNA sequence
caacccagtctcaaaaggtttac

SEQ ID NO: 4600 - DNA, 23 bp, Artificial Sequence
  human ApoB siRNA sequence
aacccagtctcaaaaggtttact

SEQ ID NO: 4601 - DNA, 23 bp, Artificial Sequence
  human ApoB siRNA sequence
acccagtctcaaaaggtttacta

SEQ ID NO: 4602 - DNA, 23 bp, Artificial Sequence
  human ApoB siRNA sequence
cccagtctcaaaaggtttactaa

SEQ ID NO: 4603 - DNA, 23 bp, Artificial Sequence
  human ApoB siRNA sequence
ccagtctcaaaaggtttactaat

SEQ ID NO: 4604 - DNA, 23 bp, Artificial Sequence
  human ApoB siRNA sequence
cagtctcaaaaggtttactaata

SEQ ID NO: 4605 - DNA, 23 bp, Artificial Sequence
  human ApoB siRNA sequence
agtctcaaaaggtttactaatat

SEQ ID NO: 4606 - DNA, 23 bp, Artificial Sequence
  human ApoB siRNA sequence
gtctcaaaaggtttactaatatt

SEQ ID NO: 4607 - DNA, 23 bp, Artificial Sequence
  human ApoB siRNA sequence
tctcaaaaggtttactaatattc

SEQ ID NO: 4608 - DNA, 23 bp, Artificial Sequence
  human ApoB siRNA sequence
ctcaaaaggtttactaatattcg

SEQ ID NO: 4609 - DNA, 23 bp, Artificial Sequence
  human ApoB siRNA sequence
tcaaaaggtttactaatattcga

SEQ ID NO: 4610 - DNA, 23 bp, Artificial Sequence
  human ApoB siRNA sequence
caaaaggtttactaatattcgat

SEQ ID NO: 4611 - DNA, 23 bp, Artificial Sequence
  human ApoB siRNA sequence
aaaaggtttactaatattcgatg

SEQ ID NO: 4612 - DNA, 23 bp, Artificial Sequence
  human ApoB siRNA sequence
aaaggtttactaatattcgatgc

SEQ ID NO: 4613 - DNA, 23 bp, Artificial Sequence
  human ApoB siRNA sequence
aaggtttactaatattcgatgca

SEQ ID NO: 4614 - DNA, 23 bp, Artificial Sequence
  human ApoB siRNA sequence
aggtttactaatattcgatgcat

SEQ ID NO: 4615 - DNA, 23 bp, Artificial Sequence
  human ApoB siRNA sequence
ggtttactaatattcgatgcatc

SEQ ID NO: 4616 - DNA, 23 bp, Artificial Sequence
  human ApoB siRNA sequence
gtttactaatattcgatgcatct

SEQ ID NO: 4617 - DNA, 23 bp, Artificial Sequence
  human ApoB siRNA sequence
tttactaatattcgatgcatcta

SEQ ID NO: 4618 - DNA, 23 bp, Artificial Sequence
  human ApoB siRNA sequence
ttactaatattcgatgcatctag

SEQ ID NO: 4619 - DNA, 23 bp, Artificial Sequence
  human ApoB siRNA sequence
tactaatattcgatgcatctagt

SEQ ID NO: 4620 - DNA, 23 bp, Artificial Sequence
  human ApoB siRNA sequence
actaatattcgatgcatctagtt

SEQ ID NO: 4621 - DNA, 23 bp, Artificial Sequence
  human ApoB siRNA sequence
ctaatattcgatgcatctagttc

SEQ ID NO: 4622 - DNA, 23 bp, Artificial Sequence
  human ApoB siRNA sequence
taatattcgatgcatctagttcc

SEQ ID NO: 4623 - DNA, 23 bp, Artificial Sequence
  human ApoB siRNA sequence
aatattcgatgcatctagttcct

SEQ ID NO: 4624 - DNA, 23 bp, Artificial Sequence
  human ApoB siRNA sequence
atattcgatgcatctagttcctg

SEQ ID NO: 4625 - DNA, 23 bp, Artificial Sequence
  human ApoB siRNA sequence
tattcgatgcatctagttcctgg

SEQ ID NO: 4626 - DNA, 23 bp, Artificial Sequence
  human ApoB siRNA sequence
attcgatgcatctagttcctggg

SEQ ID NO: 4627 - DNA, 23 bp, Artificial Sequence
  human ApoB siRNA sequence
ttcgatgcatctagttcctgggg

SEQ ID NO: 4628 - DNA, 23 bp, Artificial Sequence
  human ApoB siRNA sequence
tcgatgcatctagttcctgggga

SEQ ID NO: 4629 - DNA, 23 bp, Artificial Sequence
  human ApoB siRNA sequence
cgatgcatctagttcctggggac

SEQ ID NO: 4630 - DNA, 23 bp, Artificial Sequence
  human ApoB siRNA sequence
gatgcatctagttcctggggacc

SEQ ID NO: 4631 - DNA, 23 bp, Artificial Sequence
  human ApoB siRNA sequence
atgcatctagttcctggggacca

SEQ ID NO: 4632 - DNA, 23 bp, Artificial Sequence
  human ApoB siRNA sequence
tgcatctagttcctggggaccac

SEQ ID NO: 4633 - DNA, 23 bp, Artificial Sequence
  human ApoB siRNA sequence
gcatctagttcctggggaccaca

SEQ ID NO: 4634 - DNA, 23 bp, Artificial Sequence
  human ApoB siRNA sequence
catctagttcctggggaccacag

SEQ ID NO: 4635 - DNA, 23 bp, Artificial Sequence
  human ApoB siRNA sequence
atctagttcctggggaccacaga

SEQ ID NO: 4636 - DNA, 23 bp, Artificial Sequence
  human ApoB siRNA sequence
tctagttcctggggaccacagat

SEQ ID NO: 4637 - DNA, 23 bp, Artificial Sequence
  human ApoB siRNA sequence
ctagttcctggggaccacagatg

SEQ ID NO: 4638 - DNA, 23 bp, Artificial Sequence
  human ApoB siRNA sequence
tagttcctggggaccacagatgt

SEQ ID NO: 4639 - DNA, 23 bp, Artificial Sequence
  human ApoB siRNA sequence
agttcctggggaccacagatgtc

SEQ ID NO: 4640 - DNA, 23 bp, Artificial Sequence
  human ApoB siRNA sequence
gttcctggggaccacagatgtct

SEQ ID NO: 4641 - DNA, 23 bp, Artificial Sequence
  human ApoB siRNA sequence
ttcctggggaccacagatgtctg

SEQ ID NO: 4642 - DNA, 23 bp, Artificial Sequence
  human ApoB siRNA sequence
tcctggggaccacagatgtctgc

SEQ ID NO: 4643 - DNA, 23 bp, Artificial Sequence
  human ApoB siRNA sequence
cctggggaccacagatgtctgct

SEQ ID NO: 4644 - DNA, 23 bp, Artificial Sequence
  human ApoB siRNA sequence
ctggggaccacagatgtctgctt

SEQ ID NO: 4645 - DNA, 23 bp, Artificial Sequence
  human ApoB siRNA sequence
tggggaccacagatgtctgcttc

SEQ ID NO: 4646 - DNA, 23 bp, Artificial Sequence
  human ApoB siRNA sequence
ggggaccacagatgtctgcttca

SEQ ID NO: 4647 - DNA, 23 bp, Artificial Sequence
  human ApoB siRNA sequence
gggaccacagatgtctgcttcag

SEQ ID NO: 4648 - DNA, 23 bp, Artificial Sequence
  human ApoB siRNA sequence
ggaccacagatgtctgcttcagt

SEQ ID NO: 4649 - DNA, 23 bp, Artificial Sequence
  human ApoB siRNA sequence
gaccacagatgtctgcttcagtt

SEQ ID NO: 4650 - DNA, 23 bp, Artificial Sequence
  human ApoB siRNA sequence
accacagatgtctgcttcagttc

SEQ ID NO: 4651 - DNA, 23 bp, Artificial Sequence
  human ApoB siRNA sequence
ccacagatgtctgcttcagttca

SEQ ID NO: 4652 - DNA, 23 bp, Artificial Sequence
  human ApoB siRNA sequence
cacagatgtctgcttcagttcat

SEQ ID NO: 4653 - DNA, 23 bp, Artificial Sequence
  human ApoB siRNA sequence
acagatgtctgcttcagttcatt

SEQ ID NO: 4654 - DNA, 23 bp, Artificial Sequence
  human ApoB siRNA sequence
cagatgtctgcttcagttcattt

SEQ ID NO: 4655 - DNA, 23 bp, Artificial Sequence
  human ApoB siRNA sequence
agatgtctgcttcagttcatttg

SEQ ID NO: 4656 - DNA, 23 bp, Artificial Sequence
  human ApoB siRNA sequence
gatgtctgcttcagttcatttgg

SEQ ID NO: 4657 - DNA, 23 bp, Artificial Sequence
  human ApoB siRNA sequence
atgtctgcttcagttcatttgga

SEQ ID NO: 4658 - DNA, 23 bp, Artificial Sequence
  human ApoB siRNA sequence
tgtctgcttcagttcatttggac

SEQ ID NO: 4659 - DNA, 23 bp, Artificial Sequence
  human ApoB siRNA sequence
gtctgcttcagttcatttggact

SEQ ID NO: 4660 - DNA, 23 bp, Artificial Sequence
  human ApoB siRNA sequence
tctgcttcagttcatttggactc

SEQ ID NO: 4661 - DNA, 23 bp, Artificial Sequence
  human ApoB siRNA sequence
ctgcttcagttcatttggactcc

SEQ ID NO: 4662 - DNA, 23 bp, Artificial Sequence
  human ApoB siRNA sequence
tgcttcagttcatttggactcca

SEQ ID NO: 4663 - DNA, 23 bp, Artificial Sequence
  human ApoB siRNA sequence
gcttcagttcatttggactccaa

SEQ ID NO: 4664 - DNA, 23 bp, Artificial Sequence
  human ApoB siRNA sequence
cttcagttcatttggactccaaa

SEQ ID NO: 4665 - DNA, 23 bp, Artificial Sequence
  human ApoB siRNA sequence
ttcagttcatttggactccaaaa

SEQ ID NO: 4666 - DNA, 23 bp, Artificial Sequence
  human ApoB siRNA sequence
tcagttcatttggactccaaaaa

SEQ ID NO: 4667 - DNA, 23 bp, Artificial Sequence
  human ApoB siRNA sequence
cagttcatttggactccaaaaag

SEQ ID NO: 4668 - DNA, 23 bp, Artificial Sequence
  human ApoB siRNA sequence
agttcatttggactccaaaaaga

SEQ ID NO: 4669 - DNA, 23 bp, Artificial Sequence
  human ApoB siRNA sequence
gttcatttggactccaaaaagaa

SEQ ID NO: 4670 - DNA, 23 bp, Artificial Sequence
  human ApoB siRNA sequence
ttcatttggactccaaaaagaaa

SEQ ID NO: 4671 - DNA, 23 bp, Artificial Sequence
  human ApoB siRNA sequence
tcatttggactccaaaaagaaac

SEQ ID NO: 4672 - DNA, 23 bp, Artificial Sequence
  human ApoB siRNA sequence
catttggactccaaaaagaaaca

SEQ ID NO: 4673 - DNA, 23 bp, Artificial Sequence
  human ApoB siRNA sequence
atttggactccaaaaagaaacag

SEQ ID NO: 4674 - DNA, 23 bp, Artificial Sequence
  human ApoB siRNA sequence
tttggactccaaaaagaaacagc

SEQ ID NO: 4675 - DNA, 23 bp, Artificial Sequence
  human ApoB siRNA sequence
ttggactccaaaaagaaacagca

SEQ ID NO: 4676 - DNA, 23 bp, Artificial Sequence
  human ApoB siRNA sequence
tggactccaaaaagaaacagcat

SEQ ID NO: 4677 - DNA, 23 bp, Artificial Sequence
  human ApoB siRNA sequence
ggactccaaaaagaaacagcatt

SEQ ID NO: 4678 - DNA, 23 bp, Artificial Sequence
  human ApoB siRNA sequence
gactccaaaaagaaacagcattt

SEQ ID NO: 4679 - DNA, 23 bp, Artificial Sequence
  human ApoB siRNA sequence
actccaaaaagaaacagcatttg

SEQ ID NO: 4680 - DNA, 23 bp, Artificial Sequence
  human ApoB siRNA sequence
ctccaaaaagaaacagcatttgt

SEQ ID NO: 4681 - DNA, 23 bp, Artificial Sequence
  human ApoB siRNA sequence
tccaaaaagaaacagcatttgtt

SEQ ID NO: 4682 - DNA, 23 bp, Artificial Sequence
  human ApoB siRNA sequence
ccaaaaagaaacagcatttgttt

SEQ ID NO: 4683 - DNA, 23 bp, Artificial Sequence
  human ApoB siRNA sequence
caaaaagaaacagcatttgtttg

SEQ ID NO: 4684 - DNA, 23 bp, Artificial Sequence
  human ApoB siRNA sequence
aaaaagaaacagcatttgtttgt

SEQ ID NO: 4685 - DNA, 23 bp, Artificial Sequence
  human ApoB siRNA sequence
aaaagaaacagcatttgtttgtc

SEQ ID NO: 4686 - DNA, 23 bp, Artificial Sequence
  human ApoB siRNA sequence
aaagaaacagcatttgtttgtca

SEQ ID NO: 4687 - DNA, 23 bp, Artificial Sequence
  human ApoB siRNA sequence
aagaaacagcatttgtttgtcaa

SEQ ID NO: 4688 - DNA, 23 bp, Artificial Sequence
  human ApoB siRNA sequence
agaaacagcatttgtttgtcaaa

SEQ ID NO: 4689 - DNA, 23 bp, Artificial Sequence
  human ApoB siRNA sequence
gaaacagcatttgtttgtcaaag

SEQ ID NO: 4690 - DNA, 23 bp, Artificial Sequence
  human ApoB siRNA sequence
aaacagcatttgtttgtcaaaga

SEQ ID NO: 4691 - DNA, 23 bp, Artificial Sequence
  human ApoB siRNA sequence
aacagcatttgtttgtcaaagaa

SEQ ID NO: 4692 - DNA, 23 bp, Artificial Sequence
  human ApoB siRNA sequence
acagcatttgtttgtcaaagaag

SEQ ID NO: 4693 - DNA, 23 bp, Artificial Sequence
  human ApoB siRNA sequence
cagcatttgtttgtcaaagaagt

SEQ ID NO: 4694 - DNA, 23 bp, Artificial Sequence
  human ApoB siRNA sequence
agcatttgtttgtcaaagaagtc

SEQ ID NO: 4695 - DNA, 23 bp, Artificial Sequence
  human ApoB siRNA sequence
gcatttgtttgtcaaagaagtca

SEQ ID NO: 4696 - DNA, 23 bp, Artificial Sequence
  human ApoB siRNA sequence
catttgtttgtcaaagaagtcaa

SEQ ID NO: 4697 - DNA, 23 bp, Artificial Sequence
  human ApoB siRNA sequence
atttgtttgtcaaagaagtcaag

SEQ ID NO: 4698 - DNA, 23 bp, Artificial Sequence
  human ApoB siRNA sequence
tttgtttgtcaaagaagtcaaga

SEQ ID NO: 4699 - DNA, 23 bp, Artificial Sequence
  human ApoB siRNA sequence
ttgtttgtcaaagaagtcaagat

SEQ ID NO: 4700 - DNA, 23 bp, Artificial Sequence
  human ApoB siRNA sequence
tgtttgtcaaagaagtcaagatt

SEQ ID NO: 4701 - DNA, 23 bp, Artificial Sequence
  human ApoB siRNA sequence
gtttgtcaaagaagtcaagattg

SEQ ID NO: 4702 - DNA, 23 bp, Artificial Sequence
  human ApoB siRNA sequence
tttgtcaaagaagtcaagattga

SEQ ID NO: 4703 - DNA, 23 bp, Artificial Sequence
  human ApoB siRNA sequence
ttgtcaaagaagtcaagattgat

SEQ ID NO: 4704 - DNA, 23 bp, Artificial Sequence
  human ApoB siRNA sequence
tgtcaaagaagtcaagattgatg

SEQ ID NO: 4705 - DNA, 23 bp, Artificial Sequence
  human ApoB siRNA sequence
gtcaaagaagtcaagattgatgg

SEQ ID NO: 4706 - DNA, 23 bp, Artificial Sequence
  human ApoB siRNA sequence
tcaaagaagtcaagattgatggg

SEQ ID NO: 4707 - DNA, 23 bp, Artificial Sequence
  human ApoB siRNA sequence
caaagaagtcaagattgatgggc

SEQ ID NO: 4708 - DNA, 23 bp, Artificial Sequence
  human ApoB siRNA sequence
aaagaagtcaagattgatgggca

SEQ ID NO: 4709 - DNA, 23 bp, Artificial Sequence
  human ApoB siRNA sequence
aagaagtcaagattgatgggcag

SEQ ID NO: 4710 - DNA, 23 bp, Artificial Sequence
  human ApoB siRNA sequence
agaagtcaagattgatgggcagt

SEQ ID NO: 4711 - DNA, 23 bp, Artificial Sequence
  human ApoB siRNA sequence
gaagtcaagattgatgggcagtt

SEQ ID NO: 4712 - DNA, 23 bp, Artificial Sequence
  human ApoB siRNA sequence
aagtcaagattgatgggcagttc

SEQ ID NO: 4713 - DNA, 23 bp, Artificial Sequence
  human ApoB siRNA sequence
agtcaagattgatgggcagttca

SEQ ID NO: 4714 - DNA, 23 bp, Artificial Sequence
  human ApoB siRNA sequence
gtcaagattgatgggcagttcag

SEQ ID NO: 4715 - DNA, 23 bp, Artificial Sequence
  human ApoB siRNA sequence
tcaagattgatgggcagttcaga

SEQ ID NO: 4716 - DNA, 23 bp, Artificial Sequence
  human ApoB siRNA sequence
caagattgatgggcagttcagag

SEQ ID NO: 4717 - DNA, 23 bp, Artificial Sequence
  human ApoB siRNA sequence
aagattgatgggcagttcagagt

SEQ ID NO: 4718 - DNA, 23 bp, Artificial Sequence
  human ApoB siRNA sequence
agattgatgggcagttcagagtc

SEQ ID NO: 4719 - DNA, 23 bp, Artificial Sequence
  human ApoB siRNA sequence
gattgatgggcagttcagagtct

SEQ ID NO: 4720 - DNA, 23 bp, Artificial Sequence
  human ApoB siRNA sequence
attgatgggcagttcagagtctc

SEQ ID NO: 4721 - DNA, 23 bp, Artificial Sequence
  human ApoB siRNA sequence
ttgatgggcagttcagagtctct

SEQ ID NO: 4722 - DNA, 23 bp, Artificial Sequence
  human ApoB siRNA sequence
tgatgggcagttcagagtctctt

SEQ ID NO: 4723 - DNA, 23 bp, Artificial Sequence
  human ApoB siRNA sequence
gatgggcagttcagagtctcttc

SEQ ID NO: 4724 - DNA, 23 bp, Artificial Sequence
  human ApoB siRNA sequence
atgggcagttcagagtctcttcg

SEQ ID NO: 4725 - DNA, 23 bp, Artificial Sequence
  human ApoB siRNA sequence
tgggcagttcagagtctcttcgt

SEQ ID NO: 4726 - DNA, 23 bp, Artificial Sequence
  human ApoB siRNA sequence
gggcagttcagagtctcttcgtt

SEQ ID NO: 4727 - DNA, 23 bp, Artificial Sequence
  human ApoB siRNA sequence
ggcagttcagagtctcttcgttc

SEQ ID NO: 4728 - DNA, 23 bp, Artificial Sequence
  human ApoB siRNA sequence
gcagttcagagtctcttcgttct

SEQ ID NO: 4729 - DNA, 23 bp, Artificial Sequence
  human ApoB siRNA sequence
cagttcagagtctcttcgttcta

SEQ ID NO: 4730 - DNA, 23 bp, Artificial Sequence
  human ApoB siRNA sequence
agttcagagtctcttcgttctat

SEQ ID NO: 4731 - DNA, 23 bp, Artificial Sequence
  human ApoB siRNA sequence
gttcagagtctcttcgttctatg

SEQ ID NO: 4732 - DNA, 23 bp, Artificial Sequence
  human ApoB siRNA sequence
ttcagagtctcttcgttctatgc

SEQ ID NO: 4733 - DNA, 23 bp, Artificial Sequence
  human ApoB siRNA sequence
tcagagtctcttcgttctatgct

SEQ ID NO: 4734 - DNA, 23 bp, Artificial Sequence
  human ApoB siRNA sequence
cagagtctcttcgttctatgcta

SEQ ID NO: 4735 - DNA, 23 bp, Artificial Sequence
  human ApoB siRNA sequence
agagtctcttcgttctatgctaa

SEQ ID NO: 4736 - DNA, 23 bp, Artificial Sequence
  human ApoB siRNA sequence
gagtctcttcgttctatgctaaa

SEQ ID NO: 4737 - DNA, 23 bp, Artificial Sequence
  human ApoB siRNA sequence
agtctcttcgttctatgctaaag

SEQ ID NO: 4738 - DNA, 23 bp, Artificial Sequence
  human ApoB siRNA sequence
gtctcttcgttctatgctaaagg

SEQ ID NO: 4739 - DNA, 23 bp, Artificial Sequence
  human ApoB siRNA sequence
tctcttcgttctatgctaaaggc

SEQ ID NO: 4740 - DNA, 23 bp, Artificial Sequence
  human ApoB siRNA sequence
ctcttcgttctatgctaaaggca

SEQ ID NO: 4741 - DNA, 23 bp, Artificial Sequence
  human ApoB siRNA sequence
tcttcgttctatgctaaaggcac

SEQ ID NO: 4742 - DNA, 23 bp, Artificial Sequence
  human ApoB siRNA sequence
cttcgttctatgctaaaggcaca

SEQ ID NO: 4743 - DNA, 23 bp, Artificial Sequence
  human ApoB siRNA sequence
ttcgttctatgctaaaggcacat

SEQ ID NO: 4744 - DNA, 23 bp, Artificial Sequence
  human ApoB siRNA sequence
tcgttctatgctaaaggcacata

SEQ ID NO: 4745 - DNA, 23 bp, Artificial Sequence
  human ApoB siRNA sequence
cgttctatgctaaaggcacatat

SEQ ID NO: 4746 - DNA, 23 bp, Artificial Sequence
  human ApoB siRNA sequence
gttctatgctaaaggcacatatg

SEQ ID NO: 4747 - DNA, 23 bp, Artificial Sequence
  human ApoB siRNA sequence
ttctatgctaaaggcacatatgg

SEQ ID NO: 4748 - DNA, 23 bp, Artificial Sequence
  human ApoB siRNA sequence
tctatgctaaaggcacatatggc

SEQ ID NO: 4749 - DNA, 23 bp, Artificial Sequence
  human ApoB siRNA sequence
ctatgctaaaggcacatatggcc

SEQ ID NO: 4750 - DNA, 23 bp, Artificial Sequence
  human ApoB siRNA sequence
tatgctaaaggcacatatggcct

SEQ ID NO: 4751 - DNA, 23 bp, Artificial Sequence
  human ApoB siRNA sequence
atgctaaaggcacatatggcctg

SEQ ID NO: 4752 - DNA, 23 bp, Artificial Sequence
  human ApoB siRNA sequence
tgctaaaggcacatatggcctgt

SEQ ID NO: 4753 - DNA, 23 bp, Artificial Sequence
  human ApoB siRNA sequence
gctaaaggcacatatggcctgtc

SEQ ID NO: 4754 - DNA, 23 bp, Artificial Sequence
  human ApoB siRNA sequence
ctaaaggcacatatggcctgtct

SEQ ID NO: 4755 - DNA, 23 bp, Artificial Sequence
  human ApoB siRNA sequence
taaaggcacatatggcctgtctt

SEQ ID NO: 4756 - DNA, 23 bp, Artificial Sequence
  human ApoB siRNA sequence
aaaggcacatatggcctgtcttg

SEQ ID NO: 4757 - DNA, 23 bp, Artificial Sequence
  human ApoB siRNA sequence
aaggcacatatggcctgtcttgt

SEQ ID NO: 4758 - DNA, 23 bp, Artificial Sequence
  human ApoB siRNA sequence
aggcacatatggcctgtcttgtc

SEQ ID NO: 4759 - DNA, 23 bp, Artificial Sequence
  human ApoB siRNA sequence
ggcacatatggcctgtcttgtca

SEQ ID NO: 4760 - DNA, 23 bp, Artificial Sequence
  human ApoB siRNA sequence
gcacatatggcctgtcttgtcag

SEQ ID NO: 4761 - DNA, 23 bp, Artificial Sequence
  human ApoB siRNA sequence
cacatatggcctgtcttgtcaga

SEQ ID NO: 4762 - DNA, 23 bp, Artificial Sequence
  human ApoB siRNA sequence
acatatggcctgtcttgtcagag

SEQ ID NO: 4763 - DNA, 23 bp, Artificial Sequence
  human ApoB siRNA sequence
catatggcctgtcttgtcagagg

SEQ ID NO: 4764 - DNA, 23 bp, Artificial Sequence
  human ApoB siRNA sequence
atatggcctgtcttgtcagaggg

SEQ ID NO: 4765 - DNA, 23 bp, Artificial Sequence
  human ApoB siRNA sequence
tatggcctgtcttgtcagaggga

SEQ ID NO: 4766 - DNA, 23 bp, Artificial Sequence
  human ApoB siRNA sequence
atggcctgtcttgtcagagggat

SEQ ID NO: 4767 - DNA, 23 bp, Artificial Sequence
  human ApoB siRNA sequence
tggcctgtcttgtcagagggatc

SEQ ID NO: 4768 - DNA, 23 bp, Artificial Sequence
  human ApoB siRNA sequence
ggcctgtcttgtcagagggatcc

SEQ ID NO: 4769 - DNA, 23 bp, Artificial Sequence
  human ApoB siRNA sequence
gcctgtcttgtcagagggatcct

SEQ ID NO: 4770 - DNA, 23 bp, Artificial Sequence
  human ApoB siRNA sequence
cctgtcttgtcagagggatccta

SEQ ID NO: 4771 - DNA, 23 bp, Artificial Sequence
  human ApoB siRNA sequence
ctgtcttgtcagagggatcctaa

SEQ ID NO: 4772 - DNA, 23 bp, Artificial Sequence
  human ApoB siRNA sequence
tgtcttgtcagagggatcctaac

SEQ ID NO: 4773 - DNA, 23 bp, Artificial Sequence
  human ApoB siRNA sequence
gtcttgtcagagggatcctaaca

SEQ ID NO: 4774 - DNA, 23 bp, Artificial Sequence
  human ApoB siRNA sequence
tcttgtcagagggatcctaacac

SEQ ID NO: 4775 - DNA, 23 bp, Artificial Sequence
  human ApoB siRNA sequence
cttgtcagagggatcctaacact

SEQ ID NO: 4776 - DNA, 23 bp, Artificial Sequence
  human ApoB siRNA sequence
ttgtcagagggatcctaacactg

SEQ ID NO: 4777 - DNA, 23 bp, Artificial Sequence
  human ApoB siRNA sequence
tgtcagagggatcctaacactgg

SEQ ID NO: 4778 - DNA, 23 bp, Artificial Sequence
  human ApoB siRNA sequence
gtcagagggatcctaacactggc

SEQ ID NO: 4779 - DNA, 23 bp, Artificial Sequence
  human ApoB siRNA sequence
tcagagggatcctaacactggcc

SEQ ID NO: 4780 - DNA, 23 bp, Artificial Sequence
  human ApoB siRNA sequence
cagagggatcctaacactggccg

SEQ ID NO: 4781 - DNA, 23 bp, Artificial Sequence
  human ApoB siRNA sequence
agagggatcctaacactggccgg

SEQ ID NO: 4782 - DNA, 23 bp, Artificial Sequence
  human ApoB siRNA sequence
gagggatcctaacactggccggc

SEQ ID NO: 4783 - DNA, 23 bp, Artificial Sequence
  human ApoB siRNA sequence
agggatcctaacactggccggct

SEQ ID NO: 4784 - DNA, 23 bp, Artificial Sequence
  human ApoB siRNA sequence
gggatcctaacactggccggctc

SEQ ID NO: 4785 - DNA, 23 bp, Artificial Sequence
  human ApoB siRNA sequence
ggatcctaacactggccggctca

SEQ ID NO: 4786 - DNA, 23 bp, Artificial Sequence
  human ApoB siRNA sequence
gatcctaacactggccggctcaa

SEQ ID NO: 4787 - DNA, 23 bp, Artificial Sequence
  human ApoB siRNA sequence
atcctaacactggccggctcaat

SEQ ID NO: 4788 - DNA, 23 bp, Artificial Sequence
  human ApoB siRNA sequence
tcctaacactggccggctcaatg

SEQ ID NO: 4789 - DNA, 23 bp, Artificial Sequence
  human ApoB siRNA sequence
cctaacactggccggctcaatgg

SEQ ID NO: 4790 - DNA, 23 bp, Artificial Sequence
  human ApoB siRNA sequence
ctaacactggccggctcaatgga

SEQ ID NO: 4791 - DNA, 23 bp, Artificial Sequence
  human ApoB siRNA sequence
taacactggccggctcaatggag

SEQ ID NO: 4792 - DNA, 23 bp, Artificial Sequence
  human ApoB siRNA sequence
aacactggccggctcaatggaga

SEQ ID NO: 4793 - DNA, 23 bp, Artificial Sequence
  human ApoB siRNA sequence
acactggccggctcaatggagag

SEQ ID NO: 4794 - DNA, 23 bp, Artificial Sequence
  human ApoB siRNA sequence
cactggccggctcaatggagagt

SEQ ID NO: 4795 - DNA, 23 bp, Artificial Sequence
  human ApoB siRNA sequence
actggccggctcaatggagagtc

SEQ ID NO: 4796 - DNA, 23 bp, Artificial Sequence
  human ApoB siRNA sequence
ctggccggctcaatggagagtcc

SEQ ID NO: 4797 - DNA, 23 bp, Artificial Sequence
  human ApoB siRNA sequence
tggccggctcaatggagagtcca

SEQ ID NO: 4798 - DNA, 23 bp, Artificial Sequence
  human ApoB siRNA sequence
ggccggctcaatggagagtccaa

SEQ ID NO: 4799 - DNA, 23 bp, Artificial Sequence
  human ApoB siRNA sequence
gccggctcaatggagagtccaac

SEQ ID NO: 4800 - DNA, 23 bp, Artificial Sequence
  human ApoB siRNA sequence
ccggctcaatggagagtccaacc

SEQ ID NO: 4801 - DNA, 23 bp, Artificial Sequence
  human ApoB siRNA sequence
cggctcaatggagagtccaacct

SEQ ID NO: 4802 - DNA, 23 bp, Artificial Sequence
  human ApoB siRNA sequence
ggctcaatggagagtccaacctg

SEQ ID NO: 4803 - DNA, 23 bp, Artificial Sequence
  human ApoB siRNA sequence
gctcaatggagagtccaacctga

SEQ ID NO: 4804 - DNA, 23 bp, Artificial Sequence
  human ApoB siRNA sequence
ctcaatggagagtccaacctgag

SEQ ID NO: 4805 - DNA, 23 bp, Artificial Sequence
  human ApoB siRNA sequence
tcaatggagagtccaacctgagg

SEQ ID NO: 4806 - DNA, 23 bp, Artificial Sequence
  human ApoB siRNA sequence
caatggagagtccaacctgaggt

SEQ ID NO: 4807 - DNA, 23 bp, Artificial Sequence
  human ApoB siRNA sequence
aatggagagtccaacctgaggtt

SEQ ID NO: 4808 - DNA, 23 bp, Artificial Sequence
  human ApoB siRNA sequence
atggagagtccaacctgaggttt

SEQ ID NO: 4809 - DNA, 23 bp, Artificial Sequence
  human ApoB siRNA sequence
tggagagtccaacctgaggttta

SEQ ID NO: 4810 - DNA, 23 bp, Artificial Sequence
  human ApoB siRNA sequence
ggagagtccaacctgaggtttaa

SEQ ID NO: 4811 - DNA, 23 bp, Artificial Sequence
  human ApoB siRNA sequence
gagagtccaacctgaggtttaac

SEQ ID NO: 4812 - DNA, 23 bp, Artificial Sequence
  human ApoB siRNA sequence
agagtccaacctgaggtttaact

SEQ ID NO: 4813 - DNA, 23 bp, Artificial Sequence
  human ApoB siRNA sequence
gagtccaacctgaggtttaactc

SEQ ID NO: 4814 - DNA, 23 bp, Artificial Sequence
  human ApoB siRNA sequence
agtccaacctgaggtttaactcc

SEQ ID NO: 4815 - DNA, 23 bp, Artificial Sequence
  human ApoB siRNA sequence
gtccaacctgaggtttaactcct

SEQ ID NO: 4816 - DNA, 23 bp, Artificial Sequence
  human ApoB siRNA sequence
tccaacctgaggtttaactcctc

SEQ ID NO: 4817 - DNA, 23 bp, Artificial Sequence
  human ApoB siRNA sequence
ccaacctgaggtttaactcctcc

SEQ ID NO: 4818 - DNA, 23 bp, Artificial Sequence
  human ApoB siRNA sequence
caacctgaggtttaactcctcct

SEQ ID NO: 4819 - DNA, 23 bp, Artificial Sequence
  human ApoB siRNA sequence
aacctgaggtttaactcctccta

SEQ ID NO: 4820 - DNA, 23 bp, Artificial Sequence
  human ApoB siRNA sequence
acctgaggtttaactcctcctac

SEQ ID NO: 4821 - DNA, 23 bp, Artificial Sequence
  human ApoB siRNA sequence
cctgaggtttaactcctcctacc

SEQ ID NO: 4822 - DNA, 23 bp, Artificial Sequence
  human ApoB siRNA sequence
ctgaggtttaactcctcctacct

SEQ ID NO: 4823 - DNA, 23 bp, Artificial Sequence
  human ApoB siRNA sequence
tgaggtttaactcctcctacctc

SEQ ID NO: 4824 - DNA, 23 bp, Artificial Sequence
  human ApoB siRNA sequence
gaggtttaactcctcctacctcc

SEQ ID NO: 4825 - DNA, 23 bp, Artificial Sequence
  human ApoB siRNA sequence
aggtttaactcctcctacctcca

SEQ ID NO: 4826 - DNA, 23 bp, Artificial Sequence
  human ApoB siRNA sequence
ggtttaactcctcctacctccaa

SEQ ID NO: 4827 - DNA, 23 bp, Artificial Sequence
  human ApoB siRNA sequence
gtttaactcctcctacctccaag

SEQ ID NO: 4828 - DNA, 23 bp, Artificial Sequence
  human ApoB siRNA sequence
tttaactcctcctacctccaagg

SEQ ID NO: 4829 - DNA, 23 bp, Artificial Sequence
  human ApoB siRNA sequence
ttaactcctcctacctccaaggc

SEQ ID NO: 4830 - DNA, 23 bp, Artificial Sequence
  human ApoB siRNA sequence
taactcctcctacctccaaggca

SEQ ID NO: 4831 - DNA, 23 bp, Artificial Sequence
  human ApoB siRNA sequence
aactcctcctacctccaaggcac

SEQ ID NO: 4832 - DNA, 23 bp, Artificial Sequence
  human ApoB siRNA sequence
actcctcctacctccaaggcacc

SEQ ID NO: 4833 - DNA, 23 bp, Artificial Sequence
  human ApoB siRNA sequence
ctcctcctacctccaaggcacca

SEQ ID NO: 4834 - DNA, 23 bp, Artificial Sequence
  human ApoB siRNA sequence
tcctcctacctccaaggcaccaa

SEQ ID NO: 4835 - DNA, 23 bp, Artificial Sequence
  human ApoB siRNA sequence
cctcctacctccaaggcaccaac

SEQ ID NO: 4836 - DNA, 23 bp, Artificial Sequence
  human ApoB siRNA sequence
ctcctacctccaaggcaccaacc

SEQ ID NO: 4837 - DNA, 23 bp, Artificial Sequence
  human ApoB siRNA sequence
tcctacctccaaggcaccaacca

SEQ ID NO: 4838 - DNA, 23 bp, Artificial Sequence
  human ApoB siRNA sequence
cctacctccaaggcaccaaccag

SEQ ID NO: 4839 - DNA, 23 bp, Artificial Sequence
  human ApoB siRNA sequence
ctacctccaaggcaccaaccaga

SEQ ID NO: 4840 - DNA, 23 bp, Artificial Sequence
  human ApoB siRNA sequence
tacctccaaggcaccaaccagat

SEQ ID NO: 4841 - DNA, 23 bp, Artificial Sequence
  human ApoB siRNA sequence
acctccaaggcaccaaccagata

SEQ ID NO: 4842 - DNA, 23 bp, Artificial Sequence
  human ApoB siRNA sequence
cctccaaggcaccaaccagataa

SEQ ID NO: 4843 - DNA, 23 bp, Artificial Sequence
  human ApoB siRNA sequence
ctccaaggcaccaaccagataac

SEQ ID NO: 4844 - DNA, 23 bp, Artificial Sequence
  human ApoB siRNA sequence
tccaaggcaccaaccagataaca

SEQ ID NO: 4845 - DNA, 23 bp, Artificial Sequence
  human ApoB siRNA sequence
ccaaggcaccaaccagataacag

SEQ ID NO: 4846 - DNA, 23 bp, Artificial Sequence
  human ApoB siRNA sequence
caaggcaccaaccagataacagg

SEQ ID NO: 4847 - DNA, 23 bp, Artificial Sequence
  human ApoB siRNA sequence
aaggcaccaaccagataacagga

SEQ ID NO: 4848 - DNA, 23 bp, Artificial Sequence
  human ApoB siRNA sequence
aggcaccaaccagataacaggaa

SEQ ID NO: 4849 - DNA, 23 bp, Artificial Sequence
  human ApoB siRNA sequence
ggcaccaaccagataacaggaag

SEQ ID NO: 4850 - DNA, 23 bp, Artificial Sequence
  human ApoB siRNA sequence
gcaccaaccagataacaggaaga

SEQ ID NO: 4851 - DNA, 23 bp, Artificial Sequence
  human ApoB siRNA sequence
caccaaccagataacaggaagat

SEQ ID NO: 4852 - DNA, 23 bp, Artificial Sequence
  human ApoB siRNA sequence
accaaccagataacaggaagata

SEQ ID NO: 4853 - DNA, 23 bp, Artificial Sequence
  human ApoB siRNA sequence
ccaaccagataacaggaagatat

SEQ ID NO: 4854 - DNA, 23 bp, Artificial Sequence
  human ApoB siRNA sequence
caaccagataacaggaagatatg

SEQ ID NO: 4855 - DNA, 23 bp, Artificial Sequence
  human ApoB siRNA sequence
aaccagataacaggaagatatga

SEQ ID NO: 4856 - DNA, 23 bp, Artificial Sequence
  human ApoB siRNA sequence
accagataacaggaagatatgaa

SEQ ID NO: 4857 - DNA, 23 bp, Artificial Sequence
  human ApoB siRNA sequence
ccagataacaggaagatatgaag

SEQ ID NO: 4858 - DNA, 23 bp, Artificial Sequence
  human ApoB siRNA sequence
cagataacaggaagatatgaaga

SEQ ID NO: 4859 - DNA, 23 bp, Artificial Sequence
  human ApoB siRNA sequence
agataacaggaagatatgaagat

SEQ ID NO: 4860 - DNA, 23 bp, Artificial Sequence
  human ApoB siRNA sequence
gataacaggaagatatgaagatg

SEQ ID NO: 4861 - DNA, 23 bp, Artificial Sequence
  human ApoB siRNA sequence
ataacaggaagatatgaagatgg

SEQ ID NO: 4862 - DNA, 23 bp, Artificial Sequence
  human ApoB siRNA sequence
taacaggaagatatgaagatgga

SEQ ID NO: 4863 - DNA, 23 bp, Artificial Sequence
  human ApoB siRNA sequence
aacaggaagatatgaagatggaa

SEQ ID NO: 4864 - DNA, 23 bp, Artificial Sequence
  human ApoB siRNA sequence
acaggaagatatgaagatggaac

SEQ ID NO: 4865 - DNA, 23 bp, Artificial Sequence
  human ApoB siRNA sequence
caggaagatatgaagatggaacc

SEQ ID NO: 4866 - DNA, 23 bp, Artificial Sequence
  human ApoB siRNA sequence
aggaagatatgaagatggaaccc

SEQ ID NO: 4867 - DNA, 23 bp, Artificial Sequence
  human ApoB siRNA sequence
ggaagatatgaagatggaaccct

SEQ ID NO: 4868 - DNA, 23 bp, Artificial Sequence
  human ApoB siRNA sequence
gaagatatgaagatggaaccctc

SEQ ID NO: 4869 - DNA, 23 bp, Artificial Sequence
  human ApoB siRNA sequence
aagatatgaagatggaaccctct

SEQ ID NO: 4870 - DNA, 23 bp, Artificial Sequence
  human ApoB siRNA sequence
agatatgaagatggaaccctctc

SEQ ID NO: 4871 - DNA, 23 bp, Artificial Sequence
  human ApoB siRNA sequence
gatatgaagatggaaccctctcc

SEQ ID NO: 4872 - DNA, 23 bp, Artificial Sequence
  human ApoB siRNA sequence
atatgaagatggaaccctctccc

SEQ ID NO: 4873 - DNA, 23 bp, Artificial Sequence
  human ApoB siRNA sequence
tatgaagatggaaccctctccct

SEQ ID NO: 4874 - DNA, 23 bp, Artificial Sequence
  human ApoB siRNA sequence
atgaagatggaaccctctccctc

SEQ ID NO: 4875 - DNA, 23 bp, Artificial Sequence
  human ApoB siRNA sequence
tgaagatggaaccctctccctca

SEQ ID NO: 4876 - DNA, 23 bp, Artificial Sequence
  human ApoB siRNA sequence
gaagatggaaccctctccctcac

SEQ ID NO: 4877 - DNA, 23 bp, Artificial Sequence
  human ApoB siRNA sequence
aagatggaaccctctccctcacc

SEQ ID NO: 4878 - DNA, 23 bp, Artificial Sequence
  human ApoB siRNA sequence
agatggaaccctctccctcacct

SEQ ID NO: 4879 - DNA, 23 bp, Artificial Sequence
  human ApoB siRNA sequence
gatggaaccctctccctcacctc

SEQ ID NO: 4880 - DNA, 23 bp, Artificial Sequence
  human ApoB siRNA sequence
atggaaccctctccctcacctcc

SEQ ID NO: 4881 - DNA, 23 bp, Artificial Sequence
  human ApoB siRNA sequence
tggaaccctctccctcacctcca

SEQ ID NO: 4882 - DNA, 23 bp, Artificial Sequence
  human ApoB siRNA sequence
ggaaccctctccctcacctccac

SEQ ID NO: 4883 - DNA, 23 bp, Artificial Sequence
  human ApoB siRNA sequence
gaaccctctccctcacctccacc

SEQ ID NO: 4884 - DNA, 23 bp, Artificial Sequence
  human ApoB siRNA sequence
aaccctctccctcacctccacct

SEQ ID NO: 4885 - DNA, 23 bp, Artificial Sequence
  human ApoB siRNA sequence
accctctccctcacctccacctc

SEQ ID NO: 4886 - DNA, 23 bp, Artificial Sequence
  human ApoB siRNA sequence
ccctctccctcacctccacctct

SEQ ID NO: 4887 - DNA, 23 bp, Artificial Sequence
  human ApoB siRNA sequence
cctctccctcacctccacctctg

SEQ ID NO: 4888 - DNA, 23 bp, Artificial Sequence
  human ApoB siRNA sequence
ctctccctcacctccacctctga

SEQ ID NO: 4889 - DNA, 23 bp, Artificial Sequence
  human ApoB siRNA sequence
tctccctcacctccacctctgat

SEQ ID NO: 4890 - DNA, 23 bp, Artificial Sequence
  human ApoB siRNA sequence
ctccctcacctccacctctgatc

SEQ ID NO: 4891 - DNA, 23 bp, Artificial Sequence
  human ApoB siRNA sequence
tccctcacctccacctctgatct

SEQ ID NO: 4892 - DNA, 23 bp, Artificial Sequence
  human ApoB siRNA sequence
ccctcacctccacctctgatctg

SEQ ID NO: 4893 - DNA, 23 bp, Artificial Sequence
  human ApoB siRNA sequence
cctcacctccacctctgatctgc

SEQ ID NO: 4894 - DNA, 23 bp, Artificial Sequence
  human ApoB siRNA sequence
ctcacctccacctctgatctgca

SEQ ID NO: 4895 - DNA, 23 bp, Artificial Sequence
  human ApoB siRNA sequence
tcacctccacctctgatctgcaa

SEQ ID NO: 4896 - DNA, 23 bp, Artificial Sequence
  human ApoB siRNA sequence
cacctccacctctgatctgcaaa

SEQ ID NO: 4897 - DNA, 23 bp, Artificial Sequence
  human ApoB siRNA sequence
acctccacctctgatctgcaaag

SEQ ID NO: 4898 - DNA, 23 bp, Artificial Sequence
  human ApoB siRNA sequence
cctccacctctgatctgcaaagt

SEQ ID NO: 4899 - DNA, 23 bp, Artificial Sequence
  human ApoB siRNA sequence
ctccacctctgatctgcaaagtg

SEQ ID NO: 4900 - DNA, 23 bp, Artificial Sequence
  human ApoB siRNA sequence
tccacctctgatctgcaaagtgg

SEQ ID NO: 4901 - DNA, 23 bp, Artificial Sequence
  human ApoB siRNA sequence
ccacctctgatctgcaaagtggc

SEQ ID NO: 4902 - DNA, 23 bp, Artificial Sequence
  human ApoB siRNA sequence
cacctctgatctgcaaagtggca

SEQ ID NO: 4903 - DNA, 23 bp, Artificial Sequence
  human ApoB siRNA sequence
acctctgatctgcaaagtggcat

SEQ ID NO: 4904 - DNA, 23 bp, Artificial Sequence
  human ApoB siRNA sequence
cctctgatctgcaaagtggcatc

SEQ ID NO: 4905 - DNA, 23 bp, Artificial Sequence
  human ApoB siRNA sequence
ctctgatctgcaaagtggcatca

SEQ ID NO: 4906 - DNA, 23 bp, Artificial Sequence
  human ApoB siRNA sequence
tctgatctgcaaagtggcatcat

SEQ ID NO: 4907 - DNA, 23 bp, Artificial Sequence
  human ApoB siRNA sequence
ctgatctgcaaagtggcatcatt

SEQ ID NO: 4908 - DNA, 23 bp, Artificial Sequence
  human ApoB siRNA sequence
tgatctgcaaagtggcatcatta

SEQ ID NO: 4909 - DNA, 23 bp, Artificial Sequence
  human ApoB siRNA sequence
gatctgcaaagtggcatcattaa

SEQ ID NO: 4910 - DNA, 23 bp, Artificial Sequence
  human ApoB siRNA sequence
atctgcaaagtggcatcattaaa

SEQ ID NO: 4911 - DNA, 23 bp, Artificial Sequence
  human ApoB siRNA sequence
tctgcaaagtggcatcattaaaa

SEQ ID NO: 4912 - DNA, 23 bp, Artificial Sequence
  human ApoB siRNA sequence
ctgcaaagtggcatcattaaaaa

SEQ ID NO: 4913 - DNA, 23 bp, Artificial Sequence
  human ApoB siRNA sequence
tgcaaagtggcatcattaaaaat

SEQ ID NO: 4914 - DNA, 23 bp, Artificial Sequence
  human ApoB siRNA sequence
gcaaagtggcatcattaaaaata

SEQ ID NO: 4915 - DNA, 23 bp, Artificial Sequence
  human ApoB siRNA sequence
caaagtggcatcattaaaaatac

SEQ ID NO: 4916 - DNA, 23 bp, Artificial Sequence
  human ApoB siRNA sequence
aaagtggcatcattaaaaatact

SEQ ID NO: 4917 - DNA, 23 bp, Artificial Sequence
  human ApoB siRNA sequence
aagtggcatcattaaaaatactg

SEQ ID NO: 4918 - DNA, 23 bp, Artificial Sequence
  human ApoB siRNA sequence
agtggcatcattaaaaatactgc

SEQ ID NO: 4919 - DNA, 23 bp, Artificial Sequence
  human ApoB siRNA sequence
gtggcatcattaaaaatactgct

SEQ ID NO: 4920 - DNA, 23 bp, Artificial Sequence
  human ApoB siRNA sequence
tggcatcattaaaaatactgctt

SEQ ID NO: 4921 - DNA, 23 bp, Artificial Sequence
  human ApoB siRNA sequence
ggcatcattaaaaatactgcttc

SEQ ID NO: 4922 - DNA, 23 bp, Artificial Sequence
  human ApoB siRNA sequence
gcatcattaaaaatactgcttcc

SEQ ID NO: 4923 - DNA, 23 bp, Artificial Sequence
  human ApoB siRNA sequence
catcattaaaaatactgcttccc

SEQ ID NO: 4924 - DNA, 23 bp, Artificial Sequence
  human ApoB siRNA sequence
atcattaaaaatactgcttccct

SEQ ID NO: 4925 - DNA, 23 bp, Artificial Sequence
  human ApoB siRNA sequence
tcattaaaaatactgcttcccta

SEQ ID NO: 4926 - DNA, 23 bp, Artificial Sequence
  human ApoB siRNA sequence
cattaaaaatactgcttccctaa

SEQ ID NO: 4927 - DNA, 23 bp, Artificial Sequence
  human ApoB siRNA sequence
attaaaaatactgcttccctaaa

SEQ ID NO: 4928 - DNA, 23 bp, Artificial Sequence
  human ApoB siRNA sequence
ttaaaaatactgcttccctaaag

SEQ ID NO: 4929 - DNA, 23 bp, Artificial Sequence
  human ApoB siRNA sequence
taaaaatactgcttccctaaagt

SEQ ID NO: 4930 - DNA, 23 bp, Artificial Sequence
  human ApoB siRNA sequence
aaaaatactgcttccctaaagta

SEQ ID NO: 4931 - DNA, 23 bp, Artificial Sequence
  human ApoB siRNA sequence
aaaatactgcttccctaaagtat

SEQ ID NO: 4932 - DNA, 23 bp, Artificial Sequence
  human ApoB siRNA sequence
aaatactgcttccctaaagtatg

SEQ ID NO: 4933 - DNA, 23 bp, Artificial Sequence
  human ApoB siRNA sequence
aatactgcttccctaaagtatga

SEQ ID NO: 4934 - DNA, 23 bp, Artificial Sequence
  human ApoB siRNA sequence
atactgcttccctaaagtatgag

SEQ ID NO: 4935 - DNA, 23 bp, Artificial Sequence
  human ApoB siRNA sequence
tactgcttccctaaagtatgaga

SEQ ID NO: 4936 - DNA, 23 bp, Artificial Sequence
  human ApoB siRNA sequence
actgcttccctaaagtatgagaa

SEQ ID NO: 4937 - DNA, 23 bp, Artificial Sequence
  human ApoB siRNA sequence
ctgcttccctaaagtatgagaac

SEQ ID NO: 4938 - DNA, 23 bp, Artificial Sequence
  human ApoB siRNA sequence
tgcttccctaaagtatgagaact

SEQ ID NO: 4939 - DNA, 23 bp, Artificial Sequence
  human ApoB siRNA sequence
gcttccctaaagtatgagaacta

SEQ ID NO: 4940 - DNA, 23 bp, Artificial Sequence
  human ApoB siRNA sequence
cttccctaaagtatgagaactac

SEQ ID NO: 4941 - DNA, 23 bp, Artificial Sequence
  human ApoB siRNA sequence
ttccctaaagtatgagaactacg

SEQ ID NO: 4942 - DNA, 23 bp, Artificial Sequence
  human ApoB siRNA sequence
tccctaaagtatgagaactacga

SEQ ID NO: 4943 - DNA, 23 bp, Artificial Sequence
  human ApoB siRNA sequence
ccctaaagtatgagaactacgag

SEQ ID NO: 4944 - DNA, 23 bp, Artificial Sequence
  human ApoB siRNA sequence
cctaaagtatgagaactacgagc

SEQ ID NO: 4945 - DNA, 23 bp, Artificial Sequence
  human ApoB siRNA sequence
ctaaagtatgagaactacgagct

SEQ ID NO: 4946 - DNA, 23 bp, Artificial Sequence
  human ApoB siRNA sequence
taaagtatgagaactacgagctg

SEQ ID NO: 4947 - DNA, 23 bp, Artificial Sequence
  human ApoB siRNA sequence
aaagtatgagaactacgagctga

SEQ ID NO: 4948 - DNA, 23 bp, Artificial Sequence
  human ApoB siRNA sequence
aagtatgagaactacgagctgac

SEQ ID NO: 4949 - DNA, 23 bp, Artificial Sequence
  human ApoB siRNA sequence
agtatgagaactacgagctgact

SEQ ID NO: 4950 - DNA, 23 bp, Artificial Sequence
  human ApoB siRNA sequence
gtatgagaactacgagctgactt

SEQ ID NO: 4951 - DNA, 23 bp, Artificial Sequence
  human ApoB siRNA sequence
tatgagaactacgagctgacttt

SEQ ID NO: 4952 - DNA, 23 bp, Artificial Sequence
  human ApoB siRNA sequence
atgagaactacgagctgacttta

SEQ ID NO: 4953 - DNA, 23 bp, Artificial Sequence
  human ApoB siRNA sequence
tgagaactacgagctgactttaa

SEQ ID NO: 4954 - DNA, 23 bp, Artificial Sequence
  human ApoB siRNA sequence
gagaactacgagctgactttaaa

SEQ ID NO: 4955 - DNA, 23 bp, Artificial Sequence
  human ApoB siRNA sequence
agaactacgagctgactttaaaa

SEQ ID NO: 4956 - DNA, 23 bp, Artificial Sequence
  human ApoB siRNA sequence
gaactacgagctgactttaaaat

SEQ ID NO: 4957 - DNA, 23 bp, Artificial Sequence
  human ApoB siRNA sequence
aactacgagctgactttaaaatc

SEQ ID NO: 4958 - DNA, 23 bp, Artificial Sequence
  human ApoB siRNA sequence
actacgagctgactttaaaatct

SEQ ID NO: 4959 - DNA, 23 bp, Artificial Sequence
  human ApoB siRNA sequence
ctacgagctgactttaaaatctg

SEQ ID NO: 4960 - DNA, 23 bp, Artificial Sequence
  human ApoB siRNA sequence
tacgagctgactttaaaatctga

SEQ ID NO: 4961 - DNA, 23 bp, Artificial Sequence
  human ApoB siRNA sequence
acgagctgactttaaaatctgac

SEQ ID NO: 4962 - DNA, 23 bp, Artificial Sequence
  human ApoB siRNA sequence
cgagctgactttaaaatctgaca

SEQ ID NO: 4963 - DNA, 23 bp, Artificial Sequence
  human ApoB siRNA sequence
gagctgactttaaaatctgacac

SEQ ID NO: 4964 - DNA, 23 bp, Artificial Sequence
  human ApoB siRNA sequence
agctgactttaaaatctgacacc

SEQ ID NO: 4965 - DNA, 23 bp, Artificial Sequence
  human ApoB siRNA sequence
gctgactttaaaatctgacacca

SEQ ID NO: 4966 - DNA, 23 bp, Artificial Sequence
  human ApoB siRNA sequence
ctgactttaaaatctgacaccaa

SEQ ID NO: 4967 - DNA, 23 bp, Artificial Sequence
  human ApoB siRNA sequence
tgactttaaaatctgacaccaat

SEQ ID NO: 4968 - DNA, 23 bp, Artificial Sequence
  human ApoB siRNA sequence
gactttaaaatctgacaccaatg

SEQ ID NO: 4969 - DNA, 23 bp, Artificial Sequence
  human ApoB siRNA sequence
actttaaaatctgacaccaatgg

SEQ ID NO: 4970 - DNA, 23 bp, Artificial Sequence
  human ApoB siRNA sequence
ctttaaaatctgacaccaatggg

SEQ ID NO: 4971 - DNA, 23 bp, Artificial Sequence
  human ApoB siRNA sequence
tttaaaatctgacaccaatggga

SEQ ID NO: 4972 - DNA, 23 bp, Artificial Sequence
  human ApoB siRNA sequence
ttaaaatctgacaccaatgggaa

SEQ ID NO: 4973 - DNA, 23 bp, Artificial Sequence
  human ApoB siRNA sequence
taaaatctgacaccaatgggaag

SEQ ID NO: 4974 - DNA, 23 bp, Artificial Sequence
  human ApoB siRNA sequence
aaaatctgacaccaatgggaagt

SEQ ID NO: 4975 - DNA, 23 bp, Artificial Sequence
  human ApoB siRNA sequence
aaatctgacaccaatgggaagta

SEQ ID NO: 4976 - DNA, 23 bp, Artificial Sequence
  human ApoB siRNA sequence
aatctgacaccaatgggaagtat

SEQ ID NO: 4977 - DNA, 23 bp, Artificial Sequence
  human ApoB siRNA sequence
atctgacaccaatgggaagtata

SEQ ID NO: 4978 - DNA, 23 bp, Artificial Sequence
  human ApoB siRNA sequence
tctgacaccaatgggaagtataa

SEQ ID NO: 4979 - DNA, 23 bp, Artificial Sequence
  human ApoB siRNA sequence
ctgacaccaatgggaagtataag

SEQ ID NO: 4980 - DNA, 23 bp, Artificial Sequence
  human ApoB siRNA sequence
tgacaccaatgggaagtataaga

SEQ ID NO: 4981 - DNA, 23 bp, Artificial Sequence
  human ApoB siRNA sequence
gacaccaatgggaagtataagaa

SEQ ID NO: 4982 - DNA, 23 bp, Artificial Sequence
  human ApoB siRNA sequence
acaccaatgggaagtataagaac

SEQ ID NO: 4983 - DNA, 23 bp, Artificial Sequence
  human ApoB siRNA sequence
caccaatgggaagtataagaact

SEQ ID NO: 4984 - DNA, 23 bp, Artificial Sequence
  human ApoB siRNA sequence
accaatgggaagtataagaactt

SEQ ID NO: 4985 - DNA, 23 bp, Artificial Sequence
  human ApoB siRNA sequence
ccaatgggaagtataagaacttt

SEQ ID NO: 4986 - DNA, 23 bp, Artificial Sequence
  human ApoB siRNA sequence
caatgggaagtataagaactttg

SEQ ID NO: 4987 - DNA, 23 bp, Artificial Sequence
  human ApoB siRNA sequence
aatgggaagtataagaactttgc

SEQ ID NO: 4988 - DNA, 23 bp, Artificial Sequence
  human ApoB siRNA sequence
atgggaagtataagaactttgcc

SEQ ID NO: 4989 - DNA, 23 bp, Artificial Sequence
  human ApoB siRNA sequence
tgggaagtataagaactttgcca

SEQ ID NO: 4990 - DNA, 23 bp, Artificial Sequence
  human ApoB siRNA sequence
gggaagtataagaactttgccac

SEQ ID NO: 4991 - DNA, 23 bp, Artificial Sequence
  human ApoB siRNA sequence
ggaagtataagaactttgccact

SEQ ID NO: 4992 - DNA, 23 bp, Artificial Sequence
  human ApoB siRNA sequence
gaagtataagaactttgccactt

SEQ ID NO: 4993 - DNA, 23 bp, Artificial Sequence
  human ApoB siRNA sequence
aagtataagaactttgccacttc

SEQ ID NO: 4994 - DNA, 23 bp, Artificial Sequence
  human ApoB siRNA sequence
agtataagaactttgccacttct

SEQ ID NO: 4995 - DNA, 23 bp, Artificial Sequence
  human ApoB siRNA sequence
gtataagaactttgccacttcta

SEQ ID NO: 4996 - DNA, 23 bp, Artificial Sequence
  human ApoB siRNA sequence
tataagaactttgccacttctaa

SEQ ID NO: 4997 - DNA, 23 bp, Artificial Sequence
  human ApoB siRNA sequence
ataagaactttgccacttctaac

SEQ ID NO: 4998 - DNA, 23 bp, Artificial Sequence
  human ApoB siRNA sequence
taagaactttgccacttctaaca

SEQ ID NO: 4999 - DNA, 23 bp, Artificial Sequence
  human ApoB siRNA sequence
aagaactttgccacttctaacaa

SEQ ID NO: 5000 - DNA, 23 bp, Artificial Sequence
  human ApoB siRNA sequence
agaactttgccacttctaacaag

SEQ ID NO: 5001 - DNA, 23 bp, Artificial Sequence
  human ApoB siRNA sequence
gaactttgccacttctaacaaga

SEQ ID NO: 5002 - DNA, 23 bp, Artificial Sequence
  human ApoB siRNA sequence
aactttgccacttctaacaagat

SEQ ID NO: 5003 - DNA, 23 bp, Artificial Sequence
  human ApoB siRNA sequence
actttgccacttctaacaagatg

SEQ ID NO: 5004 - DNA, 23 bp, Artificial Sequence
  human ApoB siRNA sequence
ctttgccacttctaacaagatgg

SEQ ID NO: 5005 - DNA, 23 bp, Artificial Sequence
  human ApoB siRNA sequence
tttgccacttctaacaagatgga

SEQ ID NO: 5006 - DNA, 23 bp, Artificial Sequence
  human ApoB siRNA sequence
ttgccacttctaacaagatggat

SEQ ID NO: 5007 - DNA, 23 bp, Artificial Sequence
  human ApoB siRNA sequence
tgccacttctaacaagatggata

SEQ ID NO: 5008 - DNA, 23 bp, Artificial Sequence
  human ApoB siRNA sequence
gccacttctaacaagatggatat

SEQ ID NO: 5009 - DNA, 23 bp, Artificial Sequence
  human ApoB siRNA sequence
ccacttctaacaagatggatatg

SEQ ID NO: 5010 - DNA, 23 bp, Artificial Sequence
  human ApoB siRNA sequence
cacttctaacaagatggatatga

SEQ ID NO: 5011 - DNA, 23 bp, Artificial Sequence
  human ApoB siRNA sequence
acttctaacaagatggatatgac

SEQ ID NO: 5012 - DNA, 23 bp, Artificial Sequence
  human ApoB siRNA sequence
cttctaacaagatggatatgacc

SEQ ID NO: 5013 - DNA, 23 bp, Artificial Sequence
  human ApoB siRNA sequence
ttctaacaagatggatatgacct

SEQ ID NO: 5014 - DNA, 23 bp, Artificial Sequence
  human ApoB siRNA sequence
tctaacaagatggatatgacctt

SEQ ID NO: 5015 - DNA, 23 bp, Artificial Sequence
  human ApoB siRNA sequence
ctaacaagatggatatgaccttc

SEQ ID NO: 5016 - DNA, 23 bp, Artificial Sequence
  human ApoB siRNA sequence
taacaagatggatatgaccttct

SEQ ID NO: 5017 - DNA, 23 bp, Artificial Sequence
  human ApoB siRNA sequence
aacaagatggatatgaccttctc

SEQ ID NO: 5018 - DNA, 23 bp, Artificial Sequence
  human ApoB siRNA sequence
acaagatggatatgaccttctct

SEQ ID NO: 5019 - DNA, 23 bp, Artificial Sequence
  human ApoB siRNA sequence
caagatggatatgaccttctcta

SEQ ID NO: 5020 - DNA, 23 bp, Artificial Sequence
  human ApoB siRNA sequence
aagatggatatgaccttctctaa

SEQ ID NO: 5021 - DNA, 23 bp, Artificial Sequence
  human ApoB siRNA sequence
agatggatatgaccttctctaag

SEQ ID NO: 5022 - DNA, 23 bp, Artificial Sequence
  human ApoB siRNA sequence
gatggatatgaccttctctaagc

SEQ ID NO: 5023 - DNA, 23 bp, Artificial Sequence
  human ApoB siRNA sequence
atggatatgaccttctctaagca

SEQ ID NO: 5024 - DNA, 23 bp, Artificial Sequence
  human ApoB siRNA sequence
tggatatgaccttctctaagcaa

SEQ ID NO: 5025 - DNA, 23 bp, Artificial Sequence
  human ApoB siRNA sequence
ggatatgaccttctctaagcaaa

SEQ ID NO: 5026 - DNA, 23 bp, Artificial Sequence
  human ApoB siRNA sequence
gatatgaccttctctaagcaaaa

SEQ ID NO: 5027 - DNA, 23 bp, Artificial Sequence
  human ApoB siRNA sequence
atatgaccttctctaagcaaaat

SEQ ID NO: 5028 - DNA, 23 bp, Artificial Sequence
  human ApoB siRNA sequence
tatgaccttctctaagcaaaatg

SEQ ID NO: 5029 - DNA, 23 bp, Artificial Sequence
  human ApoB siRNA sequence
atgaccttctctaagcaaaatgc

SEQ ID NO: 5030 - DNA, 23 bp, Artificial Sequence
  human ApoB siRNA sequence
tgaccttctctaagcaaaatgca

SEQ ID NO: 5031 - DNA, 23 bp, Artificial Sequence
  human ApoB siRNA sequence
gaccttctctaagcaaaatgcac

SEQ ID NO: 5032 - DNA, 23 bp, Artificial Sequence
  human ApoB siRNA sequence
accttctctaagcaaaatgcact

SEQ ID NO: 5033 - DNA, 23 bp, Artificial Sequence
  human ApoB siRNA sequence
ccttctctaagcaaaatgcactg

SEQ ID NO: 5034 - DNA, 23 bp, Artificial Sequence
  human ApoB siRNA sequence
cttctctaagcaaaatgcactgc

SEQ ID NO: 5035 - DNA, 23 bp, Artificial Sequence
  human ApoB siRNA sequence
ttctctaagcaaaatgcactgct

SEQ ID NO: 5036 - DNA, 23 bp, Artificial Sequence
  human ApoB siRNA sequence
tctctaagcaaaatgcactgctg

SEQ ID NO: 5037 - DNA, 23 bp, Artificial Sequence
  human ApoB siRNA sequence
ctctaagcaaaatgcactgctgc

SEQ ID NO: 5038 - DNA, 23 bp, Artificial Sequence
  human ApoB siRNA sequence
tctaagcaaaatgcactgctgcg

SEQ ID NO: 5039 - DNA, 23 bp, Artificial Sequence
  human ApoB siRNA sequence
ctaagcaaaatgcactgctgcgt

SEQ ID NO: 5040 - DNA, 23 bp, Artificial Sequence
  human ApoB siRNA sequence
taagcaaaatgcactgctgcgtt

SEQ ID NO: 5041 - DNA, 23 bp, Artificial Sequence
  human ApoB siRNA sequence
aagcaaaatgcactgctgcgttc

SEQ ID NO: 5042 - DNA, 23 bp, Artificial Sequence
  human ApoB siRNA sequence
agcaaaatgcactgctgcgttct

SEQ ID NO: 5043 - DNA, 23 bp, Artificial Sequence
  human ApoB siRNA sequence
gcaaaatgcactgctgcgttctg

SEQ ID NO: 5044 - DNA, 23 bp, Artificial Sequence
  human ApoB siRNA sequence
caaaatgcactgctgcgttctga

SEQ ID NO: 5045 - DNA, 23 bp, Artificial Sequence
  human ApoB siRNA sequence
aaaatgcactgctgcgttctgaa

SEQ ID NO: 5046 - DNA, 23 bp, Artificial Sequence
  human ApoB siRNA sequence
aaatgcactgctgcgttctgaat

SEQ ID NO: 5047 - DNA, 23 bp, Artificial Sequence
  human ApoB siRNA sequence
aatgcactgctgcgttctgaata

SEQ ID NO: 5048 - DNA, 23 bp, Artificial Sequence
  human ApoB siRNA sequence
atgcactgctgcgttctgaatat

SEQ ID NO: 5049 - DNA, 23 bp, Artificial Sequence
  human ApoB siRNA sequence
tgcactgctgcgttctgaatatc

SEQ ID NO: 5050 - DNA, 23 bp, Artificial Sequence
  human ApoB siRNA sequence
gcactgctgcgttctgaatatca

SEQ ID NO: 5051 - DNA, 23 bp, Artificial Sequence
  human ApoB siRNA sequence
cactgctgcgttctgaatatcag

SEQ ID NO: 5052 - DNA, 23 bp, Artificial Sequence
  human ApoB siRNA sequence
actgctgcgttctgaatatcagg

SEQ ID NO: 5053 - DNA, 23 bp, Artificial Sequence
  human ApoB siRNA sequence
ctgctgcgttctgaatatcaggc

SEQ ID NO: 5054 - DNA, 23 bp, Artificial Sequence
  human ApoB siRNA sequence
tgctgcgttctgaatatcaggct

SEQ ID NO: 5055 - DNA, 23 bp, Artificial Sequence
  human ApoB siRNA sequence
gctgcgttctgaatatcaggctg

SEQ ID NO: 5056 - DNA, 23 bp, Artificial Sequence
  human ApoB siRNA sequence
ctgcgttctgaatatcaggctga

SEQ ID NO: 5057 - DNA, 23 bp, Artificial Sequence
  human ApoB siRNA sequence
tgcgttctgaatatcaggctgat

SEQ ID NO: 5058 - DNA, 23 bp, Artificial Sequence
  human ApoB siRNA sequence
gcgttctgaatatcaggctgatt

SEQ ID NO: 5059 - DNA, 23 bp, Artificial Sequence
  human ApoB siRNA sequence
cgttctgaatatcaggctgatta

SEQ ID NO: 5060 - DNA, 23 bp, Artificial Sequence
  human ApoB siRNA sequence
gttctgaatatcaggctgattac

SEQ ID NO: 5061 - DNA, 23 bp, Artificial Sequence
  human ApoB siRNA sequence
ttctgaatatcaggctgattacg

SEQ ID NO: 5062 - DNA, 23 bp, Artificial Sequence
  human ApoB siRNA sequence
tctgaatatcaggctgattacga

SEQ ID NO: 5063 - DNA, 23 bp, Artificial Sequence
  human ApoB siRNA sequence
ctgaatatcaggctgattacgag

SEQ ID NO: 5064 - DNA, 23 bp, Artificial Sequence
  human ApoB siRNA sequence
tgaatatcaggctgattacgagt

SEQ ID NO: 5065 - DNA, 23 bp, Artificial Sequence
  human ApoB siRNA sequence
gaatatcaggctgattacgagtc

SEQ ID NO: 5066 - DNA, 23 bp, Artificial Sequence
  human ApoB siRNA sequence
aatatcaggctgattacgagtca

SEQ ID NO: 5067 - DNA, 23 bp, Artificial Sequence
  human ApoB siRNA sequence
atatcaggctgattacgagtcat

SEQ ID NO: 5068 - DNA, 23 bp, Artificial Sequence
  human ApoB siRNA sequence
tatcaggctgattacgagtcatt

SEQ ID NO: 5069 - DNA, 23 bp, Artificial Sequence
  human ApoB siRNA sequence
atcaggctgattacgagtcattg

SEQ ID NO: 5070 - DNA, 23 bp, Artificial Sequence
  human ApoB siRNA sequence
tcaggctgattacgagtcattga

SEQ ID NO: 5071 - DNA, 23 bp, Artificial Sequence
  human ApoB siRNA sequence
caggctgattacgagtcattgag

SEQ ID NO: 5072 - DNA, 23 bp, Artificial Sequence
  human ApoB siRNA sequence
aggctgattacgagtcattgagg

SEQ ID NO: 5073 - DNA, 23 bp, Artificial Sequence
  human ApoB siRNA sequence
ggctgattacgagtcattgaggt

SEQ ID NO: 5074 - DNA, 23 bp, Artificial Sequence
  human ApoB siRNA sequence
gctgattacgagtcattgaggtt

SEQ ID NO: 5075 - DNA, 23 bp, Artificial Sequence
  human ApoB siRNA sequence
ctgattacgagtcattgaggttc

SEQ ID NO: 5076 - DNA, 23 bp, Artificial Sequence
  human ApoB siRNA sequence
tgattacgagtcattgaggttct

SEQ ID NO: 5077 - DNA, 23 bp, Artificial Sequence
  human ApoB siRNA sequence
gattacgagtcattgaggttctt

SEQ ID NO: 5078 - DNA, 23 bp, Artificial Sequence
  human ApoB siRNA sequence
attacgagtcattgaggttcttc

SEQ ID NO: 5079 - DNA, 23 bp, Artificial Sequence
  human ApoB siRNA sequence
ttacgagtcattgaggttcttca

SEQ ID NO: 5080 - DNA, 23 bp, Artificial Sequence
  human ApoB siRNA sequence
tacgagtcattgaggttcttcag

SEQ ID NO: 5081 - DNA, 23 bp, Artificial Sequence
  human ApoB siRNA sequence
acgagtcattgaggttcttcagc

SEQ ID NO: 5082 - DNA, 23 bp, Artificial Sequence
  human ApoB siRNA sequence
cgagtcattgaggttcttcagcc

SEQ ID NO: 5083 - DNA, 23 bp, Artificial Sequence
  human ApoB siRNA sequence
gagtcattgaggttcttcagcct

SEQ ID NO: 5084 - DNA, 23 bp, Artificial Sequence
  human ApoB siRNA sequence
agtcattgaggttcttcagcctg

SEQ ID NO: 5085 - DNA, 23 bp, Artificial Sequence
  human ApoB siRNA sequence
gtcattgaggttcttcagcctgc

SEQ ID NO: 5086 - DNA, 23 bp, Artificial Sequence
  human ApoB siRNA sequence
tcattgaggttcttcagcctgct

SEQ ID NO: 5087 - DNA, 23 bp, Artificial Sequence
  human ApoB siRNA sequence
cattgaggttcttcagcctgctt

SEQ ID NO: 5088 - DNA, 23 bp, Artificial Sequence
  human ApoB siRNA sequence
attgaggttcttcagcctgcttt

SEQ ID NO: 5089 - DNA, 23 bp, Artificial Sequence
  human ApoB siRNA sequence
ttgaggttcttcagcctgctttc

SEQ ID NO: 5090 - DNA, 23 bp, Artificial Sequence
  human ApoB siRNA sequence
tgaggttcttcagcctgctttct

SEQ ID NO: 5091 - DNA, 23 bp, Artificial Sequence
  human ApoB siRNA sequence
gaggttcttcagcctgctttctg

SEQ ID NO: 5092 - DNA, 23 bp, Artificial Sequence
  human ApoB siRNA sequence
aggttcttcagcctgctttctgg

SEQ ID NO: 5093 - DNA, 23 bp, Artificial Sequence
  human ApoB siRNA sequence
ggttcttcagcctgctttctgga

SEQ ID NO: 5094 - DNA, 23 bp, Artificial Sequence
  human ApoB siRNA sequence
gttcttcagcctgctttctggat

SEQ ID NO: 5095 - DNA, 23 bp, Artificial Sequence
  human ApoB siRNA sequence
ttcttcagcctgctttctggatc

SEQ ID NO: 5096 - DNA, 23 bp, Artificial Sequence
  human ApoB siRNA sequence
tcttcagcctgctttctggatca

SEQ ID NO: 5097 - DNA, 23 bp, Artificial Sequence
  human ApoB siRNA sequence
cttcagcctgctttctggatcac

SEQ ID NO: 5098 - DNA, 23 bp, Artificial Sequence
  human ApoB siRNA sequence
ttcagcctgctttctggatcact

SEQ ID NO: 5099 - DNA, 23 bp, Artificial Sequence
  human ApoB siRNA sequence
tcagcctgctttctggatcacta

SEQ ID NO: 5100 - DNA, 23 bp, Artificial Sequence
  human ApoB siRNA sequence
cagcctgctttctggatcactaa

SEQ ID NO: 5101 - DNA, 23 bp, Artificial Sequence
  human ApoB siRNA sequence
agcctgctttctggatcactaaa

SEQ ID NO: 5102 - DNA, 23 bp, Artificial Sequence
  human ApoB siRNA sequence
gcctgctttctggatcactaaat

SEQ ID NO: 5103 - DNA, 23 bp, Artificial Sequence
  human ApoB siRNA sequence
cctgctttctggatcactaaatt

SEQ ID NO: 5104 - DNA, 23 bp, Artificial Sequence
  human ApoB siRNA sequence
ctgctttctggatcactaaattc

SEQ ID NO: 5105 - DNA, 23 bp, Artificial Sequence
  human ApoB siRNA sequence
tgctttctggatcactaaattcc

SEQ ID NO: 5106 - DNA, 23 bp, Artificial Sequence
  human ApoB siRNA sequence
gctttctggatcactaaattccc

SEQ ID NO: 5107 - DNA, 23 bp, Artificial Sequence
  human ApoB siRNA sequence
ctttctggatcactaaattccca

SEQ ID NO: 5108 - DNA, 23 bp, Artificial Sequence
  human ApoB siRNA sequence
tttctggatcactaaattcccat

SEQ ID NO: 5109 - DNA, 23 bp, Artificial Sequence
  human ApoB siRNA sequence
ttctggatcactaaattcccatg

SEQ ID NO: 5110 - DNA, 23 bp, Artificial Sequence
  human ApoB siRNA sequence
tctggatcactaaattcccatgg

SEQ ID NO: 5111 - DNA, 23 bp, Artificial Sequence
  human ApoB siRNA sequence
ctggatcactaaattcccatggt

SEQ ID NO: 5112 - DNA, 23 bp, Artificial Sequence
  human ApoB siRNA sequence
tggatcactaaattcccatggtc

SEQ ID NO: 5113 - DNA, 23 bp, Artificial Sequence
  human ApoB siRNA sequence
ggatcactaaattcccatggtct

SEQ ID NO: 5114 - DNA, 23 bp, Artificial Sequence
  human ApoB siRNA sequence
gatcactaaattcccatggtctt

SEQ ID NO: 5115 - DNA, 23 bp, Artificial Sequence
  human ApoB siRNA sequence
atcactaaattcccatggtcttg

SEQ ID NO: 5116 - DNA, 23 bp, Artificial Sequence
  human ApoB siRNA sequence
tcactaaattcccatggtcttga

SEQ ID NO: 5117 - DNA, 23 bp, Artificial Sequence
  human ApoB siRNA sequence
cactaaattcccatggtcttgag

SEQ ID NO: 5118 - DNA, 23 bp, Artificial Sequence
  human ApoB siRNA sequence
actaaattcccatggtcttgagt

SEQ ID NO: 5119 - DNA, 23 bp, Artificial Sequence
  human ApoB siRNA sequence
ctaaattcccatggtcttgagtt

SEQ ID NO: 5120 - DNA, 23 bp, Artificial Sequence
  human ApoB siRNA sequence
taaattcccatggtcttgagtta

SEQ ID NO: 5121 - DNA, 23 bp, Artificial Sequence
  human ApoB siRNA sequence
aaattcccatggtcttgagttaa

SEQ ID NO: 5122 - DNA, 23 bp, Artificial Sequence
  human ApoB siRNA sequence
aattcccatggtcttgagttaaa

SEQ ID NO: 5123 - DNA, 23 bp, Artificial Sequence
  human ApoB siRNA sequence
attcccatggtcttgagttaaat

SEQ ID NO: 5124 - DNA, 23 bp, Artificial Sequence
  human ApoB siRNA sequence
ttcccatggtcttgagttaaatg

SEQ ID NO: 5125 - DNA, 23 bp, Artificial Sequence
  human ApoB siRNA sequence
tcccatggtcttgagttaaatgc

SEQ ID NO: 5126 - DNA, 23 bp, Artificial Sequence
  human ApoB siRNA sequence
cccatggtcttgagttaaatgct

SEQ ID NO: 5127 - DNA, 23 bp, Artificial Sequence
  human ApoB siRNA sequence
ccatggtcttgagttaaatgctg

SEQ ID NO: 5128 - DNA, 23 bp, Artificial Sequence
  human ApoB siRNA sequence
catggtcttgagttaaatgctga

SEQ ID NO: 5129 - DNA, 23 bp, Artificial Sequence
  human ApoB siRNA sequence
atggtcttgagttaaatgctgac

SEQ ID NO: 5130 - DNA, 23 bp, Artificial Sequence
  human ApoB siRNA sequence
tggtcttgagttaaatgctgaca

SEQ ID NO: 5131 - DNA, 23 bp, Artificial Sequence
  human ApoB siRNA sequence
ggtcttgagttaaatgctgacat

SEQ ID NO: 5132 - DNA, 23 bp, Artificial Sequence
  human ApoB siRNA sequence
gtcttgagttaaatgctgacatc

SEQ ID NO: 5133 - DNA, 23 bp, Artificial Sequence
  human ApoB siRNA sequence
tcttgagttaaatgctgacatct

SEQ ID NO: 5134 - DNA, 23 bp, Artificial Sequence
  human ApoB siRNA sequence
cttgagttaaatgctgacatctt

SEQ ID NO: 5135 - DNA, 23 bp, Artificial Sequence
  human ApoB siRNA sequence
ttgagttaaatgctgacatctta

SEQ ID NO: 5136 - DNA, 23 bp, Artificial Sequence
  human ApoB siRNA sequence
tgagttaaatgctgacatcttag

SEQ ID NO: 5137 - DNA, 23 bp, Artificial Sequence
  human ApoB siRNA sequence
gagttaaatgctgacatcttagg

SEQ ID NO: 5138 - DNA, 23 bp, Artificial Sequence
  human ApoB siRNA sequence
agttaaatgctgacatcttaggc

SEQ ID NO: 5139 - DNA, 23 bp, Artificial Sequence
  human ApoB siRNA sequence
gttaaatgctgacatcttaggca

SEQ ID NO: 5140 - DNA, 23 bp, Artificial Sequence
  human ApoB siRNA sequence
ttaaatgctgacatcttaggcac

SEQ ID NO: 5141 - DNA, 23 bp, Artificial Sequence
  human ApoB siRNA sequence
taaatgctgacatcttaggcact

SEQ ID NO: 5142 - DNA, 23 bp, Artificial Sequence
  human ApoB siRNA sequence
aaatgctgacatcttaggcactg

SEQ ID NO: 5143 - DNA, 23 bp, Artificial Sequence
  human ApoB siRNA sequence
aatgctgacatcttaggcactga

SEQ ID NO: 5144 - DNA, 23 bp, Artificial Sequence
  human ApoB siRNA sequence
atgctgacatcttaggcactgac

SEQ ID NO: 5145 - DNA, 23 bp, Artificial Sequence
  human ApoB siRNA sequence
tgctgacatcttaggcactgaca

SEQ ID NO: 5146 - DNA, 23 bp, Artificial Sequence
  human ApoB siRNA sequence
gctgacatcttaggcactgacaa

SEQ ID NO: 5147 - DNA, 23 bp, Artificial Sequence
  human ApoB siRNA sequence
ctgacatcttaggcactgacaaa

SEQ ID NO: 5148 - DNA, 23 bp, Artificial Sequence
  human ApoB siRNA sequence
tgacatcttaggcactgacaaaa

SEQ ID NO: 5149 - DNA, 23 bp, Artificial Sequence
  human ApoB siRNA sequence
gacatcttaggcactgacaaaat

SEQ ID NO: 5150 - DNA, 23 bp, Artificial Sequence
  human ApoB siRNA sequence
acatcttaggcactgacaaaatt

SEQ ID NO: 5151 - DNA, 23 bp, Artificial Sequence
  human ApoB siRNA sequence
catcttaggcactgacaaaatta

SEQ ID NO: 5152 - DNA, 23 bp, Artificial Sequence
  human ApoB siRNA sequence
atcttaggcactgacaaaattaa

SEQ ID NO: 5153 - DNA, 23 bp, Artificial Sequence
  human ApoB siRNA sequence
tcttaggcactgacaaaattaat

SEQ ID NO: 5154 - DNA, 23 bp, Artificial Sequence
  human ApoB siRNA sequence
cttaggcactgacaaaattaata

SEQ ID NO: 5155 - DNA, 23 bp, Artificial Sequence
  human ApoB siRNA sequence
ttaggcactgacaaaattaatag

SEQ ID NO: 5156 - DNA, 23 bp, Artificial Sequence
  human ApoB siRNA sequence
taggcactgacaaaattaatagt

SEQ ID NO: 5157 - DNA, 23 bp, Artificial Sequence
  human ApoB siRNA sequence
aggcactgacaaaattaatagtg

SEQ ID NO: 5158 - DNA, 23 bp, Artificial Sequence
  human ApoB siRNA sequence
ggcactgacaaaattaatagtgg

SEQ ID NO: 5159 - DNA, 23 bp, Artificial Sequence
  human ApoB siRNA sequence
gcactgacaaaattaatagtggt

SEQ ID NO: 5160 - DNA, 23 bp, Artificial Sequence
  human ApoB siRNA sequence
cactgacaaaattaatagtggtg

SEQ ID NO: 5161 - DNA, 23 bp, Artificial Sequence
  human ApoB siRNA sequence
actgacaaaattaatagtggtgc

SEQ ID NO: 5162 - DNA, 23 bp, Artificial Sequence
  human ApoB siRNA sequence
ctgacaaaattaatagtggtgct

SEQ ID NO: 5163 - DNA, 23 bp, Artificial Sequence
  human ApoB siRNA sequence
tgacaaaattaatagtggtgctc

SEQ ID NO: 5164 - DNA, 23 bp, Artificial Sequence
  human ApoB siRNA sequence
gacaaaattaatagtggtgctca

SEQ ID NO: 5165 - DNA, 23 bp, Artificial Sequence
  human ApoB siRNA sequence
acaaaattaatagtggtgctcac

SEQ ID NO: 5166 - DNA, 23 bp, Artificial Sequence
  human ApoB siRNA sequence
caaaattaatagtggtgctcaca

SEQ ID NO: 5167 - DNA, 23 bp, Artificial Sequence
  human ApoB siRNA sequence
aaaattaatagtggtgctcacaa

SEQ ID NO: 5168 - DNA, 23 bp, Artificial Sequence
  human ApoB siRNA sequence
aaattaatagtggtgctcacaag

SEQ ID NO: 5169 - DNA, 23 bp, Artificial Sequence
  human ApoB siRNA sequence
aattaatagtggtgctcacaagg

SEQ ID NO: 5170 - DNA, 23 bp, Artificial Sequence
  human ApoB siRNA sequence
attaatagtggtgctcacaaggc

SEQ ID NO: 5171 - DNA, 23 bp, Artificial Sequence
  human ApoB siRNA sequence
ttaatagtggtgctcacaaggcg

SEQ ID NO: 5172 - DNA, 23 bp, Artificial Sequence
  human ApoB siRNA sequence
taatagtggtgctcacaaggcga

SEQ ID NO: 5173 - DNA, 23 bp, Artificial Sequence
  human ApoB siRNA sequence
aatagtggtgctcacaaggcgac

SEQ ID NO: 5174 - DNA, 23 bp, Artificial Sequence
  human ApoB siRNA sequence
atagtggtgctcacaaggcgaca

SEQ ID NO: 5175 - DNA, 23 bp, Artificial Sequence
  human ApoB siRNA sequence
tagtggtgctcacaaggcgacac

SEQ ID NO: 5176 - DNA, 23 bp, Artificial Sequence
  human ApoB siRNA sequence
agtggtgctcacaaggcgacact

SEQ ID NO: 5177 - DNA, 23 bp, Artificial Sequence
  human ApoB siRNA sequence
gtggtgctcacaaggcgacacta

SEQ ID NO: 5178 - DNA, 23 bp, Artificial Sequence
  human ApoB siRNA sequence
tggtgctcacaaggcgacactaa

SEQ ID NO: 5179 - DNA, 23 bp, Artificial Sequence
  human ApoB siRNA sequence
ggtgctcacaaggcgacactaag

SEQ ID NO: 5180 - DNA, 23 bp, Artificial Sequence
  human ApoB siRNA sequence
gtgctcacaaggcgacactaagg

SEQ ID NO: 5181 - DNA, 23 bp, Artificial Sequence
  human ApoB siRNA sequence
tgctcacaaggcgacactaagga

SEQ ID NO: 5182 - DNA, 23 bp, Artificial Sequence
  human ApoB siRNA sequence
gctcacaaggcgacactaaggat

SEQ ID NO: 5183 - DNA, 23 bp, Artificial Sequence
  human ApoB siRNA sequence
ctcacaaggcgacactaaggatt

SEQ ID NO: 5184 - DNA, 23 bp, Artificial Sequence
  human ApoB siRNA sequence
tcacaaggcgacactaaggattg

SEQ ID NO: 5185 - DNA, 23 bp, Artificial Sequence
  human ApoB siRNA sequence
cacaaggcgacactaaggattgg

SEQ ID NO: 5186 - DNA, 23 bp, Artificial Sequence
  human ApoB siRNA sequence
acaaggcgacactaaggattggc

SEQ ID NO: 5187 - DNA, 23 bp, Artificial Sequence
  human ApoB siRNA sequence
caaggcgacactaaggattggcc

SEQ ID NO: 5188 - DNA, 23 bp, Artificial Sequence
  human ApoB siRNA sequence
aaggcgacactaaggattggcca

SEQ ID NO: 5189 - DNA, 23 bp, Artificial Sequence
  human ApoB siRNA sequence
aggcgacactaaggattggccaa

SEQ ID NO: 5190 - DNA, 23 bp, Artificial Sequence
  human ApoB siRNA sequence
ggcgacactaaggattggccaag

SEQ ID NO: 5191 - DNA, 23 bp, Artificial Sequence
  human ApoB siRNA sequence
gcgacactaaggattggccaaga

SEQ ID NO: 5192 - DNA, 23 bp, Artificial Sequence
  human ApoB siRNA sequence
cgacactaaggattggccaagat

SEQ ID NO: 5193 - DNA, 23 bp, Artificial Sequence
  human ApoB siRNA sequence
gacactaaggattggccaagatg

SEQ ID NO: 5194 - DNA, 23 bp, Artificial Sequence
  human ApoB siRNA sequence
acactaaggattggccaagatgg

SEQ ID NO: 5195 - DNA, 23 bp, Artificial Sequence
  human ApoB siRNA sequence
cactaaggattggccaagatgga

SEQ ID NO: 5196 - DNA, 23 bp, Artificial Sequence
  human ApoB siRNA sequence
actaaggattggccaagatggaa

SEQ ID NO: 5197 - DNA, 23 bp, Artificial Sequence
  human ApoB siRNA sequence
ctaaggattggccaagatggaat

SEQ ID NO: 5198 - DNA, 23 bp, Artificial Sequence
  human ApoB siRNA sequence
taaggattggccaagatggaata

SEQ ID NO: 5199 - DNA, 23 bp, Artificial Sequence
  human ApoB siRNA sequence
aaggattggccaagatggaatat

SEQ ID NO: 5200 - DNA, 23 bp, Artificial Sequence
  human ApoB siRNA sequence
aggattggccaagatggaatatc

SEQ ID NO: 5201 - DNA, 23 bp, Artificial Sequence
  human ApoB siRNA sequence
ggattggccaagatggaatatct

SEQ ID NO: 5202 - DNA, 23 bp, Artificial Sequence
  human ApoB siRNA sequence
gattggccaagatggaatatcta

SEQ ID NO: 5203 - DNA, 23 bp, Artificial Sequence
  human ApoB siRNA sequence
attggccaagatggaatatctac

SEQ ID NO: 5204 - DNA, 23 bp, Artificial Sequence
  human ApoB siRNA sequence
ttggccaagatggaatatctacc

SEQ ID NO: 5205 - DNA, 23 bp, Artificial Sequence
  human ApoB siRNA sequence
tggccaagatggaatatctacca

SEQ ID NO: 5206 - DNA, 23 bp, Artificial Sequence
  human ApoB siRNA sequence
ggccaagatggaatatctaccag

SEQ ID NO: 5207 - DNA, 23 bp, Artificial Sequence
  human ApoB siRNA sequence
gccaagatggaatatctaccagt

SEQ ID NO: 5208 - DNA, 23 bp, Artificial Sequence
  human ApoB siRNA sequence
ccaagatggaatatctaccagtg

SEQ ID NO: 5209 - DNA, 23 bp, Artificial Sequence
  human ApoB siRNA sequence
caagatggaatatctaccagtgc

SEQ ID NO: 5210 - DNA, 23 bp, Artificial Sequence
  human ApoB siRNA sequence
aagatggaatatctaccagtgca

SEQ ID NO: 5211 - DNA, 23 bp, Artificial Sequence
  human ApoB siRNA sequence
agatggaatatctaccagtgcaa

SEQ ID NO: 5212 - DNA, 23 bp, Artificial Sequence
  human ApoB siRNA sequence
gatggaatatctaccagtgcaac

SEQ ID NO: 5213 - DNA, 23 bp, Artificial Sequence
  human ApoB siRNA sequence
atggaatatctaccagtgcaacg

SEQ ID NO: 5214 - DNA, 23 bp, Artificial Sequence
  human ApoB siRNA sequence
tggaatatctaccagtgcaacga

SEQ ID NO: 5215 - DNA, 23 bp, Artificial Sequence
  human ApoB siRNA sequence
ggaatatctaccagtgcaacgac

SEQ ID NO: 5216 - DNA, 23 bp, Artificial Sequence
  human ApoB siRNA sequence
gaatatctaccagtgcaacgacc

SEQ ID NO: 5217 - DNA, 23 bp, Artificial Sequence
  human ApoB siRNA sequence
aatatctaccagtgcaacgacca

SEQ ID NO: 5218 - DNA, 23 bp, Artificial Sequence
  human ApoB siRNA sequence
atatctaccagtgcaacgaccaa

SEQ ID NO: 5219 - DNA, 23 bp, Artificial Sequence
  human ApoB siRNA sequence
tatctaccagtgcaacgaccaac

SEQ ID NO: 5220 - DNA, 23 bp, Artificial Sequence
  human ApoB siRNA sequence
atctaccagtgcaacgaccaact

SEQ ID NO: 5221 - DNA, 23 bp, Artificial Sequence
  human ApoB siRNA sequence
tctaccagtgcaacgaccaactt

SEQ ID NO: 5222 - DNA, 23 bp, Artificial Sequence
  human ApoB siRNA sequence
ctaccagtgcaacgaccaacttg

SEQ ID NO: 5223 - DNA, 23 bp, Artificial Sequence
  human ApoB siRNA sequence
taccagtgcaacgaccaacttga

SEQ ID NO: 5224 - DNA, 23 bp, Artificial Sequence
  human ApoB siRNA sequence
accagtgcaacgaccaacttgaa

SEQ ID NO: 5225 - DNA, 23 bp, Artificial Sequence
  human ApoB siRNA sequence
ccagtgcaacgaccaacttgaag

SEQ ID NO: 5226 - DNA, 23 bp, Artificial Sequence
  human ApoB siRNA sequence
cagtgcaacgaccaacttgaagt

SEQ ID NO: 5227 - DNA, 23 bp, Artificial Sequence
  human ApoB siRNA sequence
agtgcaacgaccaacttgaagtg

SEQ ID NO: 5228 - DNA, 23 bp, Artificial Sequence
  human ApoB siRNA sequence
gtgcaacgaccaacttgaagtgt

SEQ ID NO: 5229 - DNA, 23 bp, Artificial Sequence
  human ApoB siRNA sequence
tgcaacgaccaacttgaagtgta

SEQ ID NO: 5230 - DNA, 23 bp, Artificial Sequence
  human ApoB siRNA sequence
gcaacgaccaacttgaagtgtag

SEQ ID NO: 5231 - DNA, 23 bp, Artificial Sequence
  human ApoB siRNA sequence
caacgaccaacttgaagtgtagt

SEQ ID NO: 5232 - DNA, 23 bp, Artificial Sequence
  human ApoB siRNA sequence
aacgaccaacttgaagtgtagtc

SEQ ID NO: 5233 - DNA, 23 bp, Artificial Sequence
  human ApoB siRNA sequence
acgaccaacttgaagtgtagtct

SEQ ID NO: 5234 - DNA, 23 bp, Artificial Sequence
  human ApoB siRNA sequence
cgaccaacttgaagtgtagtctc

SEQ ID NO: 5235 - DNA, 23 bp, Artificial Sequence
  human ApoB siRNA sequence
gaccaacttgaagtgtagtctcc

SEQ ID NO: 5236 - DNA, 23 bp, Artificial Sequence
  human ApoB siRNA sequence
accaacttgaagtgtagtctcct

SEQ ID NO: 5237 - DNA, 23 bp, Artificial Sequence
  human ApoB siRNA sequence
ccaacttgaagtgtagtctcctg

SEQ ID NO: 5238 - DNA, 23 bp, Artificial Sequence
  human ApoB siRNA sequence
caacttgaagtgtagtctcctgg

SEQ ID NO: 5239 - DNA, 23 bp, Artificial Sequence
  human ApoB siRNA sequence
aacttgaagtgtagtctcctggt

SEQ ID NO: 5240 - DNA, 23 bp, Artificial Sequence
  human ApoB siRNA sequence
acttgaagtgtagtctcctggtg

SEQ ID NO: 5241 - DNA, 23 bp, Artificial Sequence
  human ApoB siRNA sequence
cttgaagtgtagtctcctggtgc

SEQ ID NO: 5242 - DNA, 23 bp, Artificial Sequence
  human ApoB siRNA sequence
ttgaagtgtagtctcctggtgct

SEQ ID NO: 5243 - DNA, 23 bp, Artificial Sequence
  human ApoB siRNA sequence
tgaagtgtagtctcctggtgctg

SEQ ID NO: 5244 - DNA, 23 bp, Artificial Sequence
  human ApoB siRNA sequence
gaagtgtagtctcctggtgctgg

SEQ ID NO: 5245 - DNA, 23 bp, Artificial Sequence
  human ApoB siRNA sequence
aagtgtagtctcctggtgctgga

SEQ ID NO: 5246 - DNA, 23 bp, Artificial Sequence
  human ApoB siRNA sequence
agtgtagtctcctggtgctggag

SEQ ID NO: 5247 - DNA, 23 bp, Artificial Sequence
  human ApoB siRNA sequence
gtgtagtctcctggtgctggaga

SEQ ID NO: 5248 - DNA, 23 bp, Artificial Sequence
  human ApoB siRNA sequence
tgtagtctcctggtgctggagaa

SEQ ID NO: 5249 - DNA, 23 bp, Artificial Sequence
  human ApoB siRNA sequence
gtagtctcctggtgctggagaat

SEQ ID NO: 5250 - DNA, 23 bp, Artificial Sequence
  human ApoB siRNA sequence
tagtctcctggtgctggagaatg

SEQ ID NO: 5251 - DNA, 23 bp, Artificial Sequence
  human ApoB siRNA sequence
agtctcctggtgctggagaatga

SEQ ID NO: 5252 - DNA, 23 bp, Artificial Sequence
  human ApoB siRNA sequence
gtctcctggtgctggagaatgag

SEQ ID NO: 5253 - DNA, 23 bp, Artificial Sequence
  human ApoB siRNA sequence
tctcctggtgctggagaatgagc

SEQ ID NO: 5254 - DNA, 23 bp, Artificial Sequence
  human ApoB siRNA sequence
ctcctggtgctggagaatgagct

SEQ ID NO: 5255 - DNA, 23 bp, Artificial Sequence
  human ApoB siRNA sequence
tcctggtgctggagaatgagctg

SEQ ID NO: 5256 - DNA, 23 bp, Artificial Sequence
  human ApoB siRNA sequence
cctggtgctggagaatgagctga

SEQ ID NO: 5257 - DNA, 23 bp, Artificial Sequence
  human ApoB siRNA sequence
ctggtgctggagaatgagctgaa

SEQ ID NO: 5258 - DNA, 23 bp, Artificial Sequence
  human ApoB siRNA sequence
tggtgctggagaatgagctgaat

SEQ ID NO: 5259 - DNA, 23 bp, Artificial Sequence
  human ApoB siRNA sequence
ggtgctggagaatgagctgaatg

SEQ ID NO: 5260 - DNA, 23 bp, Artificial Sequence
  human ApoB siRNA sequence
gtgctggagaatgagctgaatgc

SEQ ID NO: 5261 - DNA, 23 bp, Artificial Sequence
  human ApoB siRNA sequence
tgctggagaatgagctgaatgca

SEQ ID NO: 5262 - DNA, 23 bp, Artificial Sequence
  human ApoB siRNA sequence
gctggagaatgagctgaatgcag

SEQ ID NO: 5263 - DNA, 23 bp, Artificial Sequence
  human ApoB siRNA sequence
ctggagaatgagctgaatgcaga

SEQ ID NO: 5264 - DNA, 23 bp, Artificial Sequence
  human ApoB siRNA sequence
tggagaatgagctgaatgcagag

SEQ ID NO: 5265 - DNA, 23 bp, Artificial Sequence
  human ApoB siRNA sequence
ggagaatgagctgaatgcagagc

SEQ ID NO: 5266 - DNA, 23 bp, Artificial Sequence
  human ApoB siRNA sequence
gagaatgagctgaatgcagagct

SEQ ID NO: 5267 - DNA, 23 bp, Artificial Sequence
  human ApoB siRNA sequence
agaatgagctgaatgcagagctt

SEQ ID NO: 5268 - DNA, 23 bp, Artificial Sequence
  human ApoB siRNA sequence
gaatgagctgaatgcagagcttg

SEQ ID NO: 5269 - DNA, 23 bp, Artificial Sequence
  human ApoB siRNA sequence
aatgagctgaatgcagagcttgg

SEQ ID NO: 5270 - DNA, 23 bp, Artificial Sequence
  human ApoB siRNA sequence
atgagctgaatgcagagcttggc

SEQ ID NO: 5271 - DNA, 23 bp, Artificial Sequence
  human ApoB siRNA sequence
tgagctgaatgcagagcttggcc

SEQ ID NO: 5272 - DNA, 23 bp, Artificial Sequence
  human ApoB siRNA sequence
gagctgaatgcagagcttggcct

SEQ ID NO: 5273 - DNA, 23 bp, Artificial Sequence
  human ApoB siRNA sequence
agctgaatgcagagcttggcctc

SEQ ID NO: 5274 - DNA, 23 bp, Artificial Sequence
  human ApoB siRNA sequence
gctgaatgcagagcttggcctct

SEQ ID NO: 5275 - DNA, 23 bp, Artificial Sequence
  human ApoB siRNA sequence
ctgaatgcagagcttggcctctc

SEQ ID NO: 5276 - DNA, 23 bp, Artificial Sequence
  human ApoB siRNA sequence
tgaatgcagagcttggcctctct

SEQ ID NO: 5277 - DNA, 23 bp, Artificial Sequence
  human ApoB siRNA sequence
gaatgcagagcttggcctctctg

SEQ ID NO: 5278 - DNA, 23 bp, Artificial Sequence
  human ApoB siRNA sequence
aatgcagagcttggcctctctgg

SEQ ID NO: 5279 - DNA, 23 bp, Artificial Sequence
  human ApoB siRNA sequence
atgcagagcttggcctctctggg

SEQ ID NO: 5280 - DNA, 23 bp, Artificial Sequence
  human ApoB siRNA sequence
tgcagagcttggcctctctgggg

SEQ ID NO: 5281 - DNA, 23 bp, Artificial Sequence
  human ApoB siRNA sequence
gcagagcttggcctctctggggc

SEQ ID NO: 5282 - DNA, 23 bp, Artificial Sequence
  human ApoB siRNA sequence
cagagcttggcctctctggggca

SEQ ID NO: 5283 - DNA, 23 bp, Artificial Sequence
  human ApoB siRNA sequence
agagcttggcctctctggggcat

SEQ ID NO: 5284 - DNA, 23 bp, Artificial Sequence
  human ApoB siRNA sequence
gagcttggcctctctggggcatc

SEQ ID NO: 5285 - DNA, 23 bp, Artificial Sequence
  human ApoB siRNA sequence
agcttggcctctctggggcatct

SEQ ID NO: 5286 - DNA, 23 bp, Artificial Sequence
  human ApoB siRNA sequence
gcttggcctctctggggcatcta

SEQ ID NO: 5287 - DNA, 23 bp, Artificial Sequence
  human ApoB siRNA sequence
cttggcctctctggggcatctat

SEQ ID NO: 5288 - DNA, 23 bp, Artificial Sequence
  human ApoB siRNA sequence
ttggcctctctggggcatctatg

SEQ ID NO: 5289 - DNA, 23 bp, Artificial Sequence
  human ApoB siRNA sequence
tggcctctctggggcatctatga

SEQ ID NO: 5290 - DNA, 23 bp, Artificial Sequence
  human ApoB siRNA sequence
ggcctctctggggcatctatgaa

SEQ ID NO: 5291 - DNA, 23 bp, Artificial Sequence
  human ApoB siRNA sequence
gcctctctggggcatctatgaaa

SEQ ID NO: 5292 - DNA, 23 bp, Artificial Sequence
  human ApoB siRNA sequence
cctctctggggcatctatgaaat

SEQ ID NO: 5293 - DNA, 23 bp, Artificial Sequence
  human ApoB siRNA sequence
ctctctggggcatctatgaaatt

SEQ ID NO: 5294 - DNA, 23 bp, Artificial Sequence
  human ApoB siRNA sequence
tctctggggcatctatgaaatta

SEQ ID NO: 5295 - DNA, 23 bp, Artificial Sequence
  human ApoB siRNA sequence
ctctggggcatctatgaaattaa

SEQ ID NO: 5296 - DNA, 23 bp, Artificial Sequence
  human ApoB siRNA sequence
tctggggcatctatgaaattaac

SEQ ID NO: 5297 - DNA, 23 bp, Artificial Sequence
  human ApoB siRNA sequence
ctggggcatctatgaaattaaca

SEQ ID NO: 5298 - DNA, 23 bp, Artificial Sequence
  human ApoB siRNA sequence
tggggcatctatgaaattaacaa

SEQ ID NO: 5299 - DNA, 23 bp, Artificial Sequence
  human ApoB siRNA sequence
ggggcatctatgaaattaacaac

SEQ ID NO: 5300 - DNA, 23 bp, Artificial Sequence
  human ApoB siRNA sequence
gggcatctatgaaattaacaaca

SEQ ID NO: 5301 - DNA, 23 bp, Artificial Sequence
  human ApoB siRNA sequence
ggcatctatgaaattaacaacaa

SEQ ID NO: 5302 - DNA, 23 bp, Artificial Sequence
  human ApoB siRNA sequence
gcatctatgaaattaacaacaaa

SEQ ID NO: 5303 - DNA, 23 bp, Artificial Sequence
  human ApoB siRNA sequence
catctatgaaattaacaacaaat

SEQ ID NO: 5304 - DNA, 23 bp, Artificial Sequence
  human ApoB siRNA sequence
atctatgaaattaacaacaaatg

SEQ ID NO: 5305 - DNA, 23 bp, Artificial Sequence
  human ApoB siRNA sequence
tctatgaaattaacaacaaatgg

SEQ ID NO: 5306 - DNA, 23 bp, Artificial Sequence
  human ApoB siRNA sequence
ctatgaaattaacaacaaatggc

SEQ ID NO: 5307 - DNA, 23 bp, Artificial Sequence
  human ApoB siRNA sequence
tatgaaattaacaacaaatggcc

SEQ ID NO: 5308 - DNA, 23 bp, Artificial Sequence
  human ApoB siRNA sequence
atgaaattaacaacaaatggccg

SEQ ID NO: 5309 - DNA, 23 bp, Artificial Sequence
  human ApoB siRNA sequence
tgaaattaacaacaaatggccgc

SEQ ID NO: 5310 - DNA, 23 bp, Artificial Sequence
  human ApoB siRNA sequence
gaaattaacaacaaatggccgct

SEQ ID NO: 5311 - DNA, 23 bp, Artificial Sequence
  human ApoB siRNA sequence
aaattaacaacaaatggccgctt

SEQ ID NO: 5312 - DNA, 23 bp, Artificial Sequence
  human ApoB siRNA sequence
aattaacaacaaatggccgcttc

SEQ ID NO: 5313 - DNA, 23 bp, Artificial Sequence
  human ApoB siRNA sequence
attaacaacaaatggccgcttca

SEQ ID NO: 5314 - DNA, 23 bp, Artificial Sequence
  human ApoB siRNA sequence
ttaacaacaaatggccgcttcag

SEQ ID NO: 5315 - DNA, 23 bp, Artificial Sequence
  human ApoB siRNA sequence
taacaacaaatggccgcttcagg

SEQ ID NO: 5316 - DNA, 23 bp, Artificial Sequence
  human ApoB siRNA sequence
aacaacaaatggccgcttcaggg

SEQ ID NO: 5317 - DNA, 23 bp, Artificial Sequence
  human ApoB siRNA sequence
acaacaaatggccgcttcaggga

SEQ ID NO: 5318 - DNA, 23 bp, Artificial Sequence
  human ApoB siRNA sequence
caacaaatggccgcttcagggaa

SEQ ID NO: 5319 - DNA, 23 bp, Artificial Sequence
  human ApoB siRNA sequence
aacaaatggccgcttcagggaac

SEQ ID NO: 5320 - DNA, 23 bp, Artificial Sequence
  human ApoB siRNA sequence
acaaatggccgcttcagggaaca

SEQ ID NO: 5321 - DNA, 23 bp, Artificial Sequence
  human ApoB siRNA sequence
caaatggccgcttcagggaacac

SEQ ID NO: 5322 - DNA, 23 bp, Artificial Sequence
  human ApoB siRNA sequence
aaatggccgcttcagggaacaca

SEQ ID NO: 5323 - DNA, 23 bp, Artificial Sequence
  human ApoB siRNA sequence
aatggccgcttcagggaacacaa

SEQ ID NO: 5324 - DNA, 23 bp, Artificial Sequence
  human ApoB siRNA sequence
atggccgcttcagggaacacaat

SEQ ID NO: 5325 - DNA, 23 bp, Artificial Sequence
  human ApoB siRNA sequence
tggccgcttcagggaacacaatg

SEQ ID NO: 5326 - DNA, 23 bp, Artificial Sequence
  human ApoB siRNA sequence
ggccgcttcagggaacacaatgc

SEQ ID NO: 5327 - DNA, 23 bp, Artificial Sequence
  human ApoB siRNA sequence
gccgcttcagggaacacaatgca

SEQ ID NO: 5328 - DNA, 23 bp, Artificial Sequence
  human ApoB siRNA sequence
ccgcttcagggaacacaatgcaa

SEQ ID NO: 5329 - DNA, 23 bp, Artificial Sequence
  human ApoB siRNA sequence
cgcttcagggaacacaatgcaaa

SEQ ID NO: 5330 - DNA, 23 bp, Artificial Sequence
  human ApoB siRNA sequence
gcttcagggaacacaatgcaaaa

SEQ ID NO: 5331 - DNA, 23 bp, Artificial Sequence
  human ApoB siRNA sequence
cttcagggaacacaatgcaaaat

SEQ ID NO: 5332 - DNA, 23 bp, Artificial Sequence
  human ApoB siRNA sequence
ttcagggaacacaatgcaaaatt

SEQ ID NO: 5333 - DNA, 23 bp, Artificial Sequence
  human ApoB siRNA sequence
tcagggaacacaatgcaaaattc

SEQ ID NO: 5334 - DNA, 23 bp, Artificial Sequence
  human ApoB siRNA sequence
cagggaacacaatgcaaaattca

SEQ ID NO: 5335 - DNA, 23 bp, Artificial Sequence
  human ApoB siRNA sequence
agggaacacaatgcaaaattcag

SEQ ID NO: 5336 - DNA, 23 bp, Artificial Sequence
  human ApoB siRNA sequence
gggaacacaatgcaaaattcagt

SEQ ID NO: 5337 - DNA, 23 bp, Artificial Sequence
  human ApoB siRNA sequence
ggaacacaatgcaaaattcagtc

SEQ ID NO: 5338 - DNA, 23 bp, Artificial Sequence
  human ApoB siRNA sequence
gaacacaatgcaaaattcagtct

SEQ ID NO: 5339 - DNA, 23 bp, Artificial Sequence
  human ApoB siRNA sequence
aacacaatgcaaaattcagtctg

SEQ ID NO: 5340 - DNA, 23 bp, Artificial Sequence
  human ApoB siRNA sequence
acacaatgcaaaattcagtctgg

SEQ ID NO: 5341 - DNA, 23 bp, Artificial Sequence
  human ApoB siRNA sequence
cacaatgcaaaattcagtctgga

SEQ ID NO: 5342 - DNA, 23 bp, Artificial Sequence
  human ApoB siRNA sequence
acaatgcaaaattcagtctggat

SEQ ID NO: 5343 - DNA, 23 bp, Artificial Sequence
  human ApoB siRNA sequence
caatgcaaaattcagtctggatg

SEQ ID NO: 5344 - DNA, 23 bp, Artificial Sequence
  human ApoB siRNA sequence
aatgcaaaattcagtctggatgg

SEQ ID NO: 5345 - DNA, 23 bp, Artificial Sequence
  human ApoB siRNA sequence
atgcaaaattcagtctggatggg

SEQ ID NO: 5346 - DNA, 23 bp, Artificial Sequence
  human ApoB siRNA sequence
tgcaaaattcagtctggatggga

SEQ ID NO: 5347 - DNA, 23 bp, Artificial Sequence
  human ApoB siRNA sequence
gcaaaattcagtctggatgggaa

SEQ ID NO: 5348 - DNA, 23 bp, Artificial Sequence
  human ApoB siRNA sequence
caaaattcagtctggatgggaaa

SEQ ID NO: 5349 - DNA, 23 bp, Artificial Sequence
  human ApoB siRNA sequence
aaaattcagtctggatgggaaag

SEQ ID NO: 5350 - DNA, 23 bp, Artificial Sequence
  human ApoB siRNA sequence
aaattcagtctggatgggaaagc

SEQ ID NO: 5351 - DNA, 23 bp, Artificial Sequence
  human ApoB siRNA sequence
aattcagtctggatgggaaagcc

SEQ ID NO: 5352 - DNA, 23 bp, Artificial Sequence
  human ApoB siRNA sequence
attcagtctggatgggaaagccg

SEQ ID NO: 5353 - DNA, 23 bp, Artificial Sequence
  human ApoB siRNA sequence
ttcagtctggatgggaaagccgc

SEQ ID NO: 5354 - DNA, 23 bp, Artificial Sequence
  human ApoB siRNA sequence
tcagtctggatgggaaagccgcc

SEQ ID NO: 5355 - DNA, 23 bp, Artificial Sequence
  human ApoB siRNA sequence
cagtctggatgggaaagccgccc

SEQ ID NO: 5356 - DNA, 23 bp, Artificial Sequence
  human ApoB siRNA sequence
agtctggatgggaaagccgccct

SEQ ID NO: 5357 - DNA, 23 bp, Artificial Sequence
  human ApoB siRNA sequence
gtctggatgggaaagccgccctc

SEQ ID NO: 5358 - DNA, 23 bp, Artificial Sequence
  human ApoB siRNA sequence
tctggatgggaaagccgccctca

SEQ ID NO: 5359 - DNA, 23 bp, Artificial Sequence
  human ApoB siRNA sequence
ctggatgggaaagccgccctcac

SEQ ID NO: 5360 - DNA, 23 bp, Artificial Sequence
  human ApoB siRNA sequence
tggatgggaaagccgccctcaca

SEQ ID NO: 5361 - DNA, 23 bp, Artificial Sequence
  human ApoB siRNA sequence
ggatgggaaagccgccctcacag

SEQ ID NO: 5362 - DNA, 23 bp, Artificial Sequence
  human ApoB siRNA sequence
gatgggaaagccgccctcacaga

SEQ ID NO: 5363 - DNA, 23 bp, Artificial Sequence
  human ApoB siRNA sequence
atgggaaagccgccctcacagag

SEQ ID NO: 5364 - DNA, 23 bp, Artificial Sequence
  human ApoB siRNA sequence
tgggaaagccgccctcacagagc

SEQ ID NO: 5365 - DNA, 23 bp, Artificial Sequence
  human ApoB siRNA sequence
gggaaagccgccctcacagagct

SEQ ID NO: 5366 - DNA, 23 bp, Artificial Sequence
  human ApoB siRNA sequence
ggaaagccgccctcacagagcta

SEQ ID NO: 5367 - DNA, 23 bp, Artificial Sequence
  human ApoB siRNA sequence
gaaagccgccctcacagagctat

SEQ ID NO: 5368 - DNA, 23 bp, Artificial Sequence
  human ApoB siRNA sequence
aaagccgccctcacagagctatc

SEQ ID NO: 5369 - DNA, 23 bp, Artificial Sequence
  human ApoB siRNA sequence
aagccgccctcacagagctatca

SEQ ID NO: 5370 - DNA, 23 bp, Artificial Sequence
  human ApoB siRNA sequence
agccgccctcacagagctatcac

SEQ ID NO: 5371 - DNA, 23 bp, Artificial Sequence
  human ApoB siRNA sequence
gccgccctcacagagctatcact

SEQ ID NO: 5372 - DNA, 23 bp, Artificial Sequence
  human ApoB siRNA sequence
ccgccctcacagagctatcactg

SEQ ID NO: 5373 - DNA, 23 bp, Artificial Sequence
  human ApoB siRNA sequence
cgccctcacagagctatcactgg

SEQ ID NO: 5374 - DNA, 23 bp, Artificial Sequence
  human ApoB siRNA sequence
gccctcacagagctatcactggg

SEQ ID NO: 5375 - DNA, 23 bp, Artificial Sequence
  human ApoB siRNA sequence
ccctcacagagctatcactggga

SEQ ID NO: 5376 - DNA, 23 bp, Artificial Sequence
  human ApoB siRNA sequence
cctcacagagctatcactgggaa

SEQ ID NO: 5377 - DNA, 23 bp, Artificial Sequence
  human ApoB siRNA sequence
ctcacagagctatcactgggaag

SEQ ID NO: 5378 - DNA, 23 bp, Artificial Sequence
  human ApoB siRNA sequence
tcacagagctatcactgggaagt

SEQ ID NO: 5379 - DNA, 23 bp, Artificial Sequence
  human ApoB siRNA sequence
cacagagctatcactgggaagtg

SEQ ID NO: 5380 - DNA, 23 bp, Artificial Sequence
  human ApoB siRNA sequence
acagagctatcactgggaagtgc

SEQ ID NO: 5381 - DNA, 23 bp, Artificial Sequence
  human ApoB siRNA sequence
cagagctatcactgggaagtgct

SEQ ID NO: 5382 - DNA, 23 bp, Artificial Sequence
  human ApoB siRNA sequence
agagctatcactgggaagtgctt

SEQ ID NO: 5383 - DNA, 23 bp, Artificial Sequence
  human ApoB siRNA sequence
gagctatcactgggaagtgctta

SEQ ID NO: 5384 - DNA, 23 bp, Artificial Sequence
  human ApoB siRNA sequence
agctatcactgggaagtgcttat

SEQ ID NO: 5385 - DNA, 23 bp, Artificial Sequence
  human ApoB siRNA sequence
gctatcactgggaagtgcttatc

SEQ ID NO: 5386 - DNA, 23 bp, Artificial Sequence
  human ApoB siRNA sequence
ctatcactgggaagtgcttatca

SEQ ID NO: 5387 - DNA, 23 bp, Artificial Sequence
  human ApoB siRNA sequence
tatcactgggaagtgcttatcag

SEQ ID NO: 5388 - DNA, 23 bp, Artificial Sequence
  human ApoB siRNA sequence
atcactgggaagtgcttatcagg

SEQ ID NO: 5389 - DNA, 23 bp, Artificial Sequence
  human ApoB siRNA sequence
tcactgggaagtgcttatcaggc

SEQ ID NO: 5390 - DNA, 23 bp, Artificial Sequence
  human ApoB siRNA sequence
cactgggaagtgcttatcaggcc

SEQ ID NO: 5391 - DNA, 23 bp, Artificial Sequence
  human ApoB siRNA sequence
actgggaagtgcttatcaggcca

SEQ ID NO: 5392 - DNA, 23 bp, Artificial Sequence
  human ApoB siRNA sequence
ctgggaagtgcttatcaggccat

SEQ ID NO: 5393 - DNA, 23 bp, Artificial Sequence
  human ApoB siRNA sequence
tgggaagtgcttatcaggccatg

SEQ ID NO: 5394 - DNA, 23 bp, Artificial Sequence
  human ApoB siRNA sequence
gggaagtgcttatcaggccatga

SEQ ID NO: 5395 - DNA, 23 bp, Artificial Sequence
  human ApoB siRNA sequence
ggaagtgcttatcaggccatgat

SEQ ID NO: 5396 - DNA, 23 bp, Artificial Sequence
  human ApoB siRNA sequence
gaagtgcttatcaggccatgatt

SEQ ID NO: 5397 - DNA, 23 bp, Artificial Sequence
  human ApoB siRNA sequence
aagtgcttatcaggccatgattc

SEQ ID NO: 5398 - DNA, 23 bp, Artificial Sequence
  human ApoB siRNA sequence
agtgcttatcaggccatgattct

SEQ ID NO: 5399 - DNA, 23 bp, Artificial Sequence
  human ApoB siRNA sequence
gtgcttatcaggccatgattctg

SEQ ID NO: 5400 - DNA, 23 bp, Artificial Sequence
  human ApoB siRNA sequence
tgcttatcaggccatgattctgg

SEQ ID NO: 5401 - DNA, 23 bp, Artificial Sequence
  human ApoB siRNA sequence
gcttatcaggccatgattctggg

SEQ ID NO: 5402 - DNA, 23 bp, Artificial Sequence
  human ApoB siRNA sequence
cttatcaggccatgattctgggt

SEQ ID NO: 5403 - DNA, 23 bp, Artificial Sequence
  human ApoB siRNA sequence
ttatcaggccatgattctgggtg

SEQ ID NO: 5404 - DNA, 23 bp, Artificial Sequence
  human ApoB siRNA sequence
tatcaggccatgattctgggtgt

SEQ ID NO: 5405 - DNA, 23 bp, Artificial Sequence
  human ApoB siRNA sequence
atcaggccatgattctgggtgtc

SEQ ID NO: 5406 - DNA, 23 bp, Artificial Sequence
  human ApoB siRNA sequence
tcaggccatgattctgggtgtcg

SEQ ID NO: 5407 - DNA, 23 bp, Artificial Sequence
  human ApoB siRNA sequence
caggccatgattctgggtgtcga

SEQ ID NO: 5408 - DNA, 23 bp, Artificial Sequence
  human ApoB siRNA sequence
aggccatgattctgggtgtcgac

SEQ ID NO: 5409 - DNA, 23 bp, Artificial Sequence
  human ApoB siRNA sequence
ggccatgattctgggtgtcgaca

SEQ ID NO: 5410 - DNA, 23 bp, Artificial Sequence
  human ApoB siRNA sequence
gccatgattctgggtgtcgacag

SEQ ID NO: 5411 - DNA, 23 bp, Artificial Sequence
  human ApoB siRNA sequence
ccatgattctgggtgtcgacagc

SEQ ID NO: 5412 - DNA, 23 bp, Artificial Sequence
  human ApoB siRNA sequence
catgattctgggtgtcgacagca

SEQ ID NO: 5413 - DNA, 23 bp, Artificial Sequence
  human ApoB siRNA sequence
atgattctgggtgtcgacagcaa

SEQ ID NO: 5414 - DNA, 23 bp, Artificial Sequence
  human ApoB siRNA sequence
tgattctgggtgtcgacagcaaa

SEQ ID NO: 5415 - DNA, 23 bp, Artificial Sequence
  human ApoB siRNA sequence
gattctgggtgtcgacagcaaaa

SEQ ID NO: 5416 - DNA, 23 bp, Artificial Sequence
  human ApoB siRNA sequence
attctgggtgtcgacagcaaaaa

SEQ ID NO: 5417 - DNA, 23 bp, Artificial Sequence
  human ApoB siRNA sequence
ttctgggtgtcgacagcaaaaac

SEQ ID NO: 5418 - DNA, 23 bp, Artificial Sequence
  human ApoB siRNA sequence
tctgggtgtcgacagcaaaaaca

SEQ ID NO: 5419 - DNA, 23 bp, Artificial Sequence
  human ApoB siRNA sequence
ctgggtgtcgacagcaaaaacat

SEQ ID NO: 5420 - DNA, 23 bp, Artificial Sequence
  human ApoB siRNA sequence
tgggtgtcgacagcaaaaacatt

SEQ ID NO: 5421 - DNA, 23 bp, Artificial Sequence
  human ApoB siRNA sequence
gggtgtcgacagcaaaaacattt

SEQ ID NO: 5422 - DNA, 23 bp, Artificial Sequence
  human ApoB siRNA sequence
ggtgtcgacagcaaaaacatttt

SEQ ID NO: 5423 - DNA, 23 bp, Artificial Sequence
  human ApoB siRNA sequence
gtgtcgacagcaaaaacattttc

SEQ ID NO: 5424 - DNA, 23 bp, Artificial Sequence
  human ApoB siRNA sequence
tgtcgacagcaaaaacattttca

SEQ ID NO: 5425 - DNA, 23 bp, Artificial Sequence
  human ApoB siRNA sequence
gtcgacagcaaaaacattttcaa

SEQ ID NO: 5426 - DNA, 23 bp, Artificial Sequence
  human ApoB siRNA sequence
tcgacagcaaaaacattttcaac

SEQ ID NO: 5427 - DNA, 23 bp, Artificial Sequence
  human ApoB siRNA sequence
cgacagcaaaaacattttcaact

SEQ ID NO: 5428 - DNA, 23 bp, Artificial Sequence
  human ApoB siRNA sequence
gacagcaaaaacattttcaactt

SEQ ID NO: 5429 - DNA, 23 bp, Artificial Sequence
  human ApoB siRNA sequence
acagcaaaaacattttcaacttc

SEQ ID NO: 5430 - DNA, 23 bp, Artificial Sequence
  human ApoB siRNA sequence
cagcaaaaacattttcaacttca

SEQ ID NO: 5431 - DNA, 23 bp, Artificial Sequence
  human ApoB siRNA sequence
agcaaaaacattttcaacttcaa

SEQ ID NO: 5432 - DNA, 23 bp, Artificial Sequence
  human ApoB siRNA sequence
gcaaaaacattttcaacttcaag

SEQ ID NO: 5433 - DNA, 23 bp, Artificial Sequence
  human ApoB siRNA sequence
caaaaacattttcaacttcaagg

SEQ ID NO: 5434 - DNA, 23 bp, Artificial Sequence
  human ApoB siRNA sequence
aaaaacattttcaacttcaaggt

SEQ ID NO: 5435 - DNA, 23 bp, Artificial Sequence
  human ApoB siRNA sequence
aaaacattttcaacttcaaggtc

SEQ ID NO: 5436 - DNA, 23 bp, Artificial Sequence
  human ApoB siRNA sequence
aaacattttcaacttcaaggtca

SEQ ID NO: 5437 - DNA, 23 bp, Artificial Sequence
  human ApoB siRNA sequence
aacattttcaacttcaaggtcag

SEQ ID NO: 5438 - DNA, 23 bp, Artificial Sequence
  human ApoB siRNA sequence
acattttcaacttcaaggtcagt

SEQ ID NO: 5439 - DNA, 23 bp, Artificial Sequence
  human ApoB siRNA sequence
cattttcaacttcaaggtcagtc

SEQ ID NO: 5440 - DNA, 23 bp, Artificial Sequence
  human ApoB siRNA sequence
attttcaacttcaaggtcagtca

SEQ ID NO: 5441 - DNA, 23 bp, Artificial Sequence
  human ApoB siRNA sequence
ttttcaacttcaaggtcagtcaa

SEQ ID NO: 5442 - DNA, 23 bp, Artificial Sequence
  human ApoB siRNA sequence
tttcaacttcaaggtcagtcaag

SEQ ID NO: 5443 - DNA, 23 bp, Artificial Sequence
  human ApoB siRNA sequence
ttcaacttcaaggtcagtcaaga

SEQ ID NO: 5444 - DNA, 23 bp, Artificial Sequence
  human ApoB siRNA sequence
tcaacttcaaggtcagtcaagaa

SEQ ID NO: 5445 - DNA, 23 bp, Artificial Sequence
  human ApoB siRNA sequence
caacttcaaggtcagtcaagaag

SEQ ID NO: 5446 - DNA, 23 bp, Artificial Sequence
  human ApoB siRNA sequence
aacttcaaggtcagtcaagaagg

SEQ ID NO: 5447 - DNA, 23 bp, Artificial Sequence
  human ApoB siRNA sequence
acttcaaggtcagtcaagaagga

SEQ ID NO: 5448 - DNA, 23 bp, Artificial Sequence
  human ApoB siRNA sequence
cttcaaggtcagtcaagaaggac

SEQ ID NO: 5449 - DNA, 23 bp, Artificial Sequence
  human ApoB siRNA sequence
ttcaaggtcagtcaagaaggact

SEQ ID NO: 5450 - DNA, 23 bp, Artificial Sequence
  human ApoB siRNA sequence
tcaaggtcagtcaagaaggactt

SEQ ID NO: 5451 - DNA, 23 bp, Artificial Sequence
  human ApoB siRNA sequence
caaggtcagtcaagaaggactta

SEQ ID NO: 5452 - DNA, 23 bp, Artificial Sequence
  human ApoB siRNA sequence
aaggtcagtcaagaaggacttaa

SEQ ID NO: 5453 - DNA, 23 bp, Artificial Sequence
  human ApoB siRNA sequence
aggtcagtcaagaaggacttaag

SEQ ID NO: 5454 - DNA, 23 bp, Artificial Sequence
  human ApoB siRNA sequence
ggtcagtcaagaaggacttaagc

SEQ ID NO: 5455 - DNA, 23 bp, Artificial Sequence
  human ApoB siRNA sequence
gtcagtcaagaaggacttaagct

SEQ ID NO: 5456 - DNA, 23 bp, Artificial Sequence
  human ApoB siRNA sequence
tcagtcaagaaggacttaagctc

SEQ ID NO: 5457 - DNA, 23 bp, Artificial Sequence
  human ApoB siRNA sequence
cagtcaagaaggacttaagctct

SEQ ID NO: 5458 - DNA, 23 bp, Artificial Sequence
  human ApoB siRNA sequence
agtcaagaaggacttaagctctc

SEQ ID NO: 5459 - DNA, 23 bp, Artificial Sequence
  human ApoB siRNA sequence
gtcaagaaggacttaagctctca

SEQ ID NO: 5460 - DNA, 23 bp, Artificial Sequence
  human ApoB siRNA sequence
tcaagaaggacttaagctctcaa

SEQ ID NO: 5461 - DNA, 23 bp, Artificial Sequence
  human ApoB siRNA sequence
caagaaggacttaagctctcaaa

SEQ ID NO: 5462 - DNA, 23 bp, Artificial Sequence
  human ApoB siRNA sequence
aagaaggacttaagctctcaaat

SEQ ID NO: 5463 - DNA, 23 bp, Artificial Sequence
  human ApoB siRNA sequence
agaaggacttaagctctcaaatg

SEQ ID NO: 5464 - DNA, 23 bp, Artificial Sequence
  human ApoB siRNA sequence
gaaggacttaagctctcaaatga

SEQ ID NO: 5465 - DNA, 23 bp, Artificial Sequence
  human ApoB siRNA sequence
aaggacttaagctctcaaatgac

SEQ ID NO: 5466 - DNA, 23 bp, Artificial Sequence
  human ApoB siRNA sequence
aggacttaagctctcaaatgaca

SEQ ID NO: 5467 - DNA, 23 bp, Artificial Sequence
  human ApoB siRNA sequence
ggacttaagctctcaaatgacat

SEQ ID NO: 5468 - DNA, 23 bp, Artificial Sequence
  human ApoB siRNA sequence
gacttaagctctcaaatgacatg

SEQ ID NO: 5469 - DNA, 23 bp, Artificial Sequence
  human ApoB siRNA sequence
acttaagctctcaaatgacatga

SEQ ID NO: 5470 - DNA, 23 bp, Artificial Sequence
  human ApoB siRNA sequence
cttaagctctcaaatgacatgat

SEQ ID NO: 5471 - DNA, 23 bp, Artificial Sequence
  human ApoB siRNA sequence
ttaagctctcaaatgacatgatg

SEQ ID NO: 5472 - DNA, 23 bp, Artificial Sequence
  human ApoB siRNA sequence
taagctctcaaatgacatgatgg

SEQ ID NO: 5473 - DNA, 23 bp, Artificial Sequence
  human ApoB siRNA sequence
aagctctcaaatgacatgatggg

SEQ ID NO: 5474 - DNA, 23 bp, Artificial Sequence
  human ApoB siRNA sequence
agctctcaaatgacatgatgggc

SEQ ID NO: 5475 - DNA, 23 bp, Artificial Sequence
  human ApoB siRNA sequence
gctctcaaatgacatgatgggct

SEQ ID NO: 5476 - DNA, 23 bp, Artificial Sequence
  human ApoB siRNA sequence
ctctcaaatgacatgatgggctc

SEQ ID NO: 5477 - DNA, 23 bp, Artificial Sequence
  human ApoB siRNA sequence
tctcaaatgacatgatgggctca

SEQ ID NO: 5478 - DNA, 23 bp, Artificial Sequence
  human ApoB siRNA sequence
ctcaaatgacatgatgggctcat

SEQ ID NO: 5479 - DNA, 23 bp, Artificial Sequence
  human ApoB siRNA sequence
tcaaatgacatgatgggctcata

SEQ ID NO: 5480 - DNA, 23 bp, Artificial Sequence
  human ApoB siRNA sequence
caaatgacatgatgggctcatat

SEQ ID NO: 5481 - DNA, 23 bp, Artificial Sequence
  human ApoB siRNA sequence
aaatgacatgatgggctcatatg

SEQ ID NO: 5482 - DNA, 23 bp, Artificial Sequence
  human ApoB siRNA sequence
aatgacatgatgggctcatatgc

SEQ ID NO: 5483 - DNA, 23 bp, Artificial Sequence
  human ApoB siRNA sequence
atgacatgatgggctcatatgct

SEQ ID NO: 5484 - DNA, 23 bp, Artificial Sequence
  human ApoB siRNA sequence
tgacatgatgggctcatatgctg

SEQ ID NO: 5485 - DNA, 23 bp, Artificial Sequence
  human ApoB siRNA sequence
gacatgatgggctcatatgctga

SEQ ID NO: 5486 - DNA, 23 bp, Artificial Sequence
  human ApoB siRNA sequence
acatgatgggctcatatgctgaa

SEQ ID NO: 5487 - DNA, 23 bp, Artificial Sequence
  human ApoB siRNA sequence
catgatgggctcatatgctgaaa

SEQ ID NO: 5488 - DNA, 23 bp, Artificial Sequence
  human ApoB siRNA sequence
atgatgggctcatatgctgaaat

SEQ ID NO: 5489 - DNA, 23 bp, Artificial Sequence
  human ApoB siRNA sequence
tgatgggctcatatgctgaaatg

SEQ ID NO: 5490 - DNA, 23 bp, Artificial Sequence
  human ApoB siRNA sequence
gatgggctcatatgctgaaatga

SEQ ID NO: 5491 - DNA, 23 bp, Artificial Sequence
  human ApoB siRNA sequence
atgggctcatatgctgaaatgaa

SEQ ID NO: 5492 - DNA, 23 bp, Artificial Sequence
  human ApoB siRNA sequence
tgggctcatatgctgaaatgaaa

SEQ ID NO: 5493 - DNA, 23 bp, Artificial Sequence
  human ApoB siRNA sequence
gggctcatatgctgaaatgaaat

SEQ ID NO: 5494 - DNA, 23 bp, Artificial Sequence
  human ApoB siRNA sequence
ggctcatatgctgaaatgaaatt

SEQ ID NO: 5495 - DNA, 23 bp, Artificial Sequence
  human ApoB siRNA sequence
gctcatatgctgaaatgaaattt

SEQ ID NO: 5496 - DNA, 23 bp, Artificial Sequence
  human ApoB siRNA sequence
ctcatatgctgaaatgaaatttg

SEQ ID NO: 5497 - DNA, 23 bp, Artificial Sequence
  human ApoB siRNA sequence
tcatatgctgaaatgaaatttga

SEQ ID NO: 5498 - DNA, 23 bp, Artificial Sequence
  human ApoB siRNA sequence
catatgctgaaatgaaatttgac

SEQ ID NO: 5499 - DNA, 23 bp, Artificial Sequence
  human ApoB siRNA sequence
atatgctgaaatgaaatttgacc

SEQ ID NO: 5500 - DNA, 23 bp, Artificial Sequence
  human ApoB siRNA sequence
tatgctgaaatgaaatttgacca

SEQ ID NO: 5501 - DNA, 23 bp, Artificial Sequence
  human ApoB siRNA sequence
atgctgaaatgaaatttgaccac

SEQ ID NO: 5502 - DNA, 23 bp, Artificial Sequence
  human ApoB siRNA sequence
tgctgaaatgaaatttgaccaca

SEQ ID NO: 5503 - DNA, 23 bp, Artificial Sequence
  human ApoB siRNA sequence
gctgaaatgaaatttgaccacac

SEQ ID NO: 5504 - DNA, 23 bp, Artificial Sequence
  human ApoB siRNA sequence
ctgaaatgaaatttgaccacaca

SEQ ID NO: 5505 - DNA, 23 bp, Artificial Sequence
  human ApoB siRNA sequence
tgaaatgaaatttgaccacacaa

SEQ ID NO: 5506 - DNA, 23 bp, Artificial Sequence
  human ApoB siRNA sequence
gaaatgaaatttgaccacacaaa

SEQ ID NO: 5507 - DNA, 23 bp, Artificial Sequence
  human ApoB siRNA sequence
aaatgaaatttgaccacacaaac

SEQ ID NO: 5508 - DNA, 23 bp, Artificial Sequence
  human ApoB siRNA sequence
aatgaaatttgaccacacaaaca

SEQ ID NO: 5509 - DNA, 23 bp, Artificial Sequence
  human ApoB siRNA sequence
atgaaatttgaccacacaaacag

SEQ ID NO: 5510 - DNA, 23 bp, Artificial Sequence
  human ApoB siRNA sequence
tgaaatttgaccacacaaacagt

SEQ ID NO: 5511 - DNA, 23 bp, Artificial Sequence
  human ApoB siRNA sequence
gaaatttgaccacacaaacagtc

SEQ ID NO: 5512 - DNA, 23 bp, Artificial Sequence
  human ApoB siRNA sequence
aaatttgaccacacaaacagtct

SEQ ID NO: 5513 - DNA, 23 bp, Artificial Sequence
  human ApoB siRNA sequence
aatttgaccacacaaacagtctg

SEQ ID NO: 5514 - DNA, 23 bp, Artificial Sequence
  human ApoB siRNA sequence
atttgaccacacaaacagtctga

SEQ ID NO: 5515 - DNA, 23 bp, Artificial Sequence
  human ApoB siRNA sequence
tttgaccacacaaacagtctgaa

SEQ ID NO: 5516 - DNA, 23 bp, Artificial Sequence
  human ApoB siRNA sequence
ttgaccacacaaacagtctgaac

SEQ ID NO: 5517 - DNA, 23 bp, Artificial Sequence
  human ApoB siRNA sequence
tgaccacacaaacagtctgaaca

SEQ ID NO: 5518 - DNA, 23 bp, Artificial Sequence
  human ApoB siRNA sequence
gaccacacaaacagtctgaacat

SEQ ID NO: 5519 - DNA, 23 bp, Artificial Sequence
  human ApoB siRNA sequence
accacacaaacagtctgaacatt

SEQ ID NO: 5520 - DNA, 23 bp, Artificial Sequence
  human ApoB siRNA sequence
ccacacaaacagtctgaacattg

SEQ ID NO: 5521 - DNA, 23 bp, Artificial Sequence
  human ApoB siRNA sequence
cacacaaacagtctgaacattgc

SEQ ID NO: 5522 - DNA, 23 bp, Artificial Sequence
  human ApoB siRNA sequence
acacaaacagtctgaacattgca

SEQ ID NO: 5523 - DNA, 23 bp, Artificial Sequence
  human ApoB siRNA sequence
cacaaacagtctgaacattgcag

SEQ ID NO: 5524 - DNA, 23 bp, Artificial Sequence
  human ApoB siRNA sequence
acaaacagtctgaacattgcagg

SEQ ID NO: 5525 - DNA, 23 bp, Artificial Sequence
  human ApoB siRNA sequence
caaacagtctgaacattgcaggc

SEQ ID NO: 5526 - DNA, 23 bp, Artificial Sequence
  human ApoB siRNA sequence
aaacagtctgaacattgcaggct

SEQ ID NO: 5527 - DNA, 23 bp, Artificial Sequence
  human ApoB siRNA sequence
aacagtctgaacattgcaggctt

SEQ ID NO: 5528 - DNA, 23 bp, Artificial Sequence
  human ApoB siRNA sequence
acagtctgaacattgcaggctta

SEQ ID NO: 5529 - DNA, 23 bp, Artificial Sequence
  human ApoB siRNA sequence
cagtctgaacattgcaggcttat

SEQ ID NO: 5530 - DNA, 23 bp, Artificial Sequence
  human ApoB siRNA sequence
agtctgaacattgcaggcttatc

SEQ ID NO: 5531 - DNA, 23 bp, Artificial Sequence
  human ApoB siRNA sequence
gtctgaacattgcaggcttatca

SEQ ID NO: 5532 - DNA, 23 bp, Artificial Sequence
  human ApoB siRNA sequence
tctgaacattgcaggcttatcac

SEQ ID NO: 5533 - DNA, 23 bp, Artificial Sequence
  human ApoB siRNA sequence
ctgaacattgcaggcttatcact

SEQ ID NO: 5534 - DNA, 23 bp, Artificial Sequence
  human ApoB siRNA sequence
tgaacattgcaggcttatcactg

SEQ ID NO: 5535 - DNA, 23 bp, Artificial Sequence
  human ApoB siRNA sequence
gaacattgcaggcttatcactgg

SEQ ID NO: 5536 - DNA, 23 bp, Artificial Sequence
  human ApoB siRNA sequence
aacattgcaggcttatcactgga

SEQ ID NO: 5537 - DNA, 23 bp, Artificial Sequence
  human ApoB siRNA sequence
acattgcaggcttatcactggac

SEQ ID NO: 5538 - DNA, 23 bp, Artificial Sequence
  human ApoB siRNA sequence
cattgcaggcttatcactggact

SEQ ID NO: 5539 - DNA, 23 bp, Artificial Sequence
  human ApoB siRNA sequence
attgcaggcttatcactggactt

SEQ ID NO: 5540 - DNA, 23 bp, Artificial Sequence
  human ApoB siRNA sequence
ttgcaggcttatcactggacttc

SEQ ID NO: 5541 - DNA, 23 bp, Artificial Sequence
  human ApoB siRNA sequence
tgcaggcttatcactggacttct

SEQ ID NO: 5542 - DNA, 23 bp, Artificial Sequence
  human ApoB siRNA sequence
gcaggcttatcactggacttctc

SEQ ID NO: 5543 - DNA, 23 bp, Artificial Sequence
  human ApoB siRNA sequence
caggcttatcactggacttctct

SEQ ID NO: 5544 - DNA, 23 bp, Artificial Sequence
  human ApoB siRNA sequence
aggcttatcactggacttctctt

SEQ ID NO: 5545 - DNA, 23 bp, Artificial Sequence
  human ApoB siRNA sequence
ggcttatcactggacttctcttc

SEQ ID NO: 5546 - DNA, 23 bp, Artificial Sequence
  human ApoB siRNA sequence
gcttatcactggacttctcttca

SEQ ID NO: 5547 - DNA, 23 bp, Artificial Sequence
  human ApoB siRNA sequence
cttatcactggacttctcttcaa

SEQ ID NO: 5548 - DNA, 23 bp, Artificial Sequence
  human ApoB siRNA sequence
ttatcactggacttctcttcaaa

SEQ ID NO: 5549 - DNA, 23 bp, Artificial Sequence
  human ApoB siRNA sequence
tatcactggacttctcttcaaaa

SEQ ID NO: 5550 - DNA, 23 bp, Artificial Sequence
  human ApoB siRNA sequence
atcactggacttctcttcaaaac

SEQ ID NO: 5551 - DNA, 23 bp, Artificial Sequence
  human ApoB siRNA sequence
tcactggacttctcttcaaaact

SEQ ID NO: 5552 - DNA, 23 bp, Artificial Sequence
  human ApoB siRNA sequence
cactggacttctcttcaaaactt

SEQ ID NO: 5553 - DNA, 23 bp, Artificial Sequence
  human ApoB siRNA sequence
actggacttctcttcaaaacttg

SEQ ID NO: 5554 - DNA, 23 bp, Artificial Sequence
  human ApoB siRNA sequence
ctggacttctcttcaaaacttga

SEQ ID NO: 5555 - DNA, 23 bp, Artificial Sequence
  human ApoB siRNA sequence
tggacttctcttcaaaacttgac

SEQ ID NO: 5556 - DNA, 23 bp, Artificial Sequence
  human ApoB siRNA sequence
ggacttctcttcaaaacttgaca

SEQ ID NO: 5557 - DNA, 23 bp, Artificial Sequence
  human ApoB siRNA sequence
gacttctcttcaaaacttgacaa

SEQ ID NO: 5558 - DNA, 23 bp, Artificial Sequence
  human ApoB siRNA sequence
acttctcttcaaaacttgacaac

SEQ ID NO: 5559 - DNA, 23 bp, Artificial Sequence
  human ApoB siRNA sequence
cttctcttcaaaacttgacaaca

SEQ ID NO: 5560 - DNA, 23 bp, Artificial Sequence
  human ApoB siRNA sequence
ttctcttcaaaacttgacaacat

SEQ ID NO: 5561 - DNA, 23 bp, Artificial Sequence
  human ApoB siRNA sequence
tctcttcaaaacttgacaacatt

SEQ ID NO: 5562 - DNA, 23 bp, Artificial Sequence
  human ApoB siRNA sequence
ctcttcaaaacttgacaacattt

SEQ ID NO: 5563 - DNA, 23 bp, Artificial Sequence
  human ApoB siRNA sequence
tcttcaaaacttgacaacattta

SEQ ID NO: 5564 - DNA, 23 bp, Artificial Sequence
  human ApoB siRNA sequence
cttcaaaacttgacaacatttac

SEQ ID NO: 5565 - DNA, 23 bp, Artificial Sequence
  human ApoB siRNA sequence
ttcaaaacttgacaacatttaca

SEQ ID NO: 5566 - DNA, 23 bp, Artificial Sequence
  human ApoB siRNA sequence
tcaaaacttgacaacatttacag

SEQ ID NO: 5567 - DNA, 23 bp, Artificial Sequence
  human ApoB siRNA sequence
caaaacttgacaacatttacagc

SEQ ID NO: 5568 - DNA, 23 bp, Artificial Sequence
  human ApoB siRNA sequence
aaaacttgacaacatttacagct

SEQ ID NO: 5569 - DNA, 23 bp, Artificial Sequence
  human ApoB siRNA sequence
aaacttgacaacatttacagctc

SEQ ID NO: 5570 - DNA, 23 bp, Artificial Sequence
  human ApoB siRNA sequence
aacttgacaacatttacagctct

SEQ ID NO: 5571 - DNA, 23 bp, Artificial Sequence
  human ApoB siRNA sequence
acttgacaacatttacagctctg

SEQ ID NO: 5572 - DNA, 23 bp, Artificial Sequence
  human ApoB siRNA sequence
cttgacaacatttacagctctga

SEQ ID NO: 5573 - DNA, 23 bp, Artificial Sequence
  human ApoB siRNA sequence
ttgacaacatttacagctctgac

SEQ ID NO: 5574 - DNA, 23 bp, Artificial Sequence
  human ApoB siRNA sequence
tgacaacatttacagctctgaca

SEQ ID NO: 5575 - DNA, 23 bp, Artificial Sequence
  human ApoB siRNA sequence
gacaacatttacagctctgacaa

SEQ ID NO: 5576 - DNA, 23 bp, Artificial Sequence
  human ApoB siRNA sequence
acaacatttacagctctgacaag

SEQ ID NO: 5577 - DNA, 23 bp, Artificial Sequence
  human ApoB siRNA sequence
caacatttacagctctgacaagt

SEQ ID NO: 5578 - DNA, 23 bp, Artificial Sequence
  human ApoB siRNA sequence
aacatttacagctctgacaagtt

SEQ ID NO: 5579 - DNA, 23 bp, Artificial Sequence
  human ApoB siRNA sequence
acatttacagctctgacaagttt

SEQ ID NO: 5580 - DNA, 23 bp, Artificial Sequence
  human ApoB siRNA sequence
catttacagctctgacaagtttt

SEQ ID NO: 5581 - DNA, 23 bp, Artificial Sequence
  human ApoB siRNA sequence
atttacagctctgacaagtttta

SEQ ID NO: 5582 - DNA, 23 bp, Artificial Sequence
  human ApoB siRNA sequence
tttacagctctgacaagttttat

SEQ ID NO: 5583 - DNA, 23 bp, Artificial Sequence
  human ApoB siRNA sequence
ttacagctctgacaagttttata

SEQ ID NO: 5584 - DNA, 23 bp, Artificial Sequence
  human ApoB siRNA sequence
tacagctctgacaagttttataa

SEQ ID NO: 5585 - DNA, 23 bp, Artificial Sequence
  human ApoB siRNA sequence
acagctctgacaagttttataag

SEQ ID NO: 5586 - DNA, 23 bp, Artificial Sequence
  human ApoB siRNA sequence
cagctctgacaagttttataagc

SEQ ID NO: 5587 - DNA, 23 bp, Artificial Sequence
  human ApoB siRNA sequence
agctctgacaagttttataagca

SEQ ID NO: 5588 - DNA, 23 bp, Artificial Sequence
  human ApoB siRNA sequence
gctctgacaagttttataagcaa

SEQ ID NO: 5589 - DNA, 23 bp, Artificial Sequence
  human ApoB siRNA sequence
ctctgacaagttttataagcaaa

SEQ ID NO: 5590 - DNA, 23 bp, Artificial Sequence
  human ApoB siRNA sequence
tctgacaagttttataagcaaac

SEQ ID NO: 5591 - DNA, 23 bp, Artificial Sequence
  human ApoB siRNA sequence
ctgacaagttttataagcaaact

SEQ ID NO: 5592 - DNA, 23 bp, Artificial Sequence
  human ApoB siRNA sequence
tgacaagttttataagcaaactg

SEQ ID NO: 5593 - DNA, 23 bp, Artificial Sequence
  human ApoB siRNA sequence
gacaagttttataagcaaactgt

SEQ ID NO: 5594 - DNA, 23 bp, Artificial Sequence
  human ApoB siRNA sequence
acaagttttataagcaaactgtt

SEQ ID NO: 5595 - DNA, 23 bp, Artificial Sequence
  human ApoB siRNA sequence
caagttttataagcaaactgtta

SEQ ID NO: 5596 - DNA, 23 bp, Artificial Sequence
  human ApoB siRNA sequence
aagttttataagcaaactgttaa

SEQ ID NO: 5597 - DNA, 23 bp, Artificial Sequence
  human ApoB siRNA sequence
agttttataagcaaactgttaat

SEQ ID NO: 5598 - DNA, 23 bp, Artificial Sequence
  human ApoB siRNA sequence
gttttataagcaaactgttaatt

SEQ ID NO: 5599 - DNA, 23 bp, Artificial Sequence
  human ApoB siRNA sequence
ttttataagcaaactgttaattt

SEQ ID NO: 5600 - DNA, 23 bp, Artificial Sequence
  human ApoB siRNA sequence
tttataagcaaactgttaattta

SEQ ID NO: 5601 - DNA, 23 bp, Artificial Sequence
  human ApoB siRNA sequence
ttataagcaaactgttaatttac

SEQ ID NO: 5602 - DNA, 23 bp, Artificial Sequence
  human ApoB siRNA sequence
tataagcaaactgttaatttaca

SEQ ID NO: 5603 - DNA, 23 bp, Artificial Sequence
  human ApoB siRNA sequence
ataagcaaactgttaatttacag

SEQ ID NO: 5604 - DNA, 23 bp, Artificial Sequence
  human ApoB siRNA sequence
taagcaaactgttaatttacagc

SEQ ID NO: 5605 - DNA, 23 bp, Artificial Sequence
  human ApoB siRNA sequence
aagcaaactgttaatttacagct

SEQ ID NO: 5606 - DNA, 23 bp, Artificial Sequence
  human ApoB siRNA sequence
agcaaactgttaatttacagcta

SEQ ID NO: 5607 - DNA, 23 bp, Artificial Sequence
  human ApoB siRNA sequence
gcaaactgttaatttacagctac

SEQ ID NO: 5608 - DNA, 23 bp, Artificial Sequence
  human ApoB siRNA sequence
caaactgttaatttacagctaca

SEQ ID NO: 5609 - DNA, 23 bp, Artificial Sequence
  human ApoB siRNA sequence
aaactgttaatttacagctacag

SEQ ID NO: 5610 - DNA, 23 bp, Artificial Sequence
  human ApoB siRNA sequence
aactgttaatttacagctacagc

SEQ ID NO: 5611 - DNA, 23 bp, Artificial Sequence
  human ApoB siRNA sequence
actgttaatttacagctacagcc

SEQ ID NO: 5612 - DNA, 23 bp, Artificial Sequence
  human ApoB siRNA sequence
ctgttaatttacagctacagccc

SEQ ID NO: 5613 - DNA, 23 bp, Artificial Sequence
  human ApoB siRNA sequence
tgttaatttacagctacagccct

SEQ ID NO: 5614 - DNA, 23 bp, Artificial Sequence
  human ApoB siRNA sequence
gttaatttacagctacagcccta

SEQ ID NO: 5615 - DNA, 23 bp, Artificial Sequence
  human ApoB siRNA sequence
ttaatttacagctacagccctat

SEQ ID NO: 5616 - DNA, 23 bp, Artificial Sequence
  human ApoB siRNA sequence
taatttacagctacagccctatt

SEQ ID NO: 5617 - DNA, 23 bp, Artificial Sequence
  human ApoB siRNA sequence
aatttacagctacagccctattc

SEQ ID NO: 5618 - DNA, 23 bp, Artificial Sequence
  human ApoB siRNA sequence
atttacagctacagccctattct

SEQ ID NO: 5619 - DNA, 23 bp, Artificial Sequence
  human ApoB siRNA sequence
tttacagctacagccctattctc

SEQ ID NO: 5620 - DNA, 23 bp, Artificial Sequence
  human ApoB siRNA sequence
ttacagctacagccctattctct

SEQ ID NO: 5621 - DNA, 23 bp, Artificial Sequence
  human ApoB siRNA sequence
tacagctacagccctattctctg

SEQ ID NO: 5622 - DNA, 23 bp, Artificial Sequence
  human ApoB siRNA sequence
acagctacagccctattctctgg

SEQ ID NO: 5623 - DNA, 23 bp, Artificial Sequence
  human ApoB siRNA sequence
cagctacagccctattctctggt

SEQ ID NO: 5624 - DNA, 23 bp, Artificial Sequence
  human ApoB siRNA sequence
agctacagccctattctctggta

SEQ ID NO: 5625 - DNA, 23 bp, Artificial Sequence
  human ApoB siRNA sequence
gctacagccctattctctggtaa

SEQ ID NO: 5626 - DNA, 23 bp, Artificial Sequence
  human ApoB siRNA sequence
ctacagccctattctctggtaac

SEQ ID NO: 5627 - DNA, 23 bp, Artificial Sequence
  human ApoB siRNA sequence
tacagccctattctctggtaact

SEQ ID NO: 5628 - DNA, 23 bp, Artificial Sequence
  human ApoB siRNA sequence
acagccctattctctggtaacta

SEQ ID NO: 5629 - DNA, 23 bp, Artificial Sequence
  human ApoB siRNA sequence
cagccctattctctggtaactac

SEQ ID NO: 5630 - DNA, 23 bp, Artificial Sequence
  human ApoB siRNA sequence
agccctattctctggtaactact

SEQ ID NO: 5631 - DNA, 23 bp, Artificial Sequence
  human ApoB siRNA sequence
gccctattctctggtaactactt

SEQ ID NO: 5632 - DNA, 23 bp, Artificial Sequence
  human ApoB siRNA sequence
ccctattctctggtaactacttt

SEQ ID NO: 5633 - DNA, 23 bp, Artificial Sequence
  human ApoB siRNA sequence
cctattctctggtaactacttta

SEQ ID NO: 5634 - DNA, 23 bp, Artificial Sequence
  human ApoB siRNA sequence
ctattctctggtaactactttaa

SEQ ID NO: 5635 - DNA, 23 bp, Artificial Sequence
  human ApoB siRNA sequence
tattctctggtaactactttaaa

SEQ ID NO: 5636 - DNA, 23 bp, Artificial Sequence
  human ApoB siRNA sequence
attctctggtaactactttaaac

SEQ ID NO: 5637 - DNA, 23 bp, Artificial Sequence
  human ApoB siRNA sequence
ttctctggtaactactttaaaca

SEQ ID NO: 5638 - DNA, 23 bp, Artificial Sequence
  human ApoB siRNA sequence
tctctggtaactactttaaacag

SEQ ID NO: 5639 - DNA, 23 bp, Artificial Sequence
  human ApoB siRNA sequence
ctctggtaactactttaaacagt

SEQ ID NO: 5640 - DNA, 23 bp, Artificial Sequence
  human ApoB siRNA sequence
tctggtaactactttaaacagtg

SEQ ID NO: 5641 - DNA, 23 bp, Artificial Sequence
  human ApoB siRNA sequence
ctggtaactactttaaacagtga

SEQ ID NO: 5642 - DNA, 23 bp, Artificial Sequence
  human ApoB siRNA sequence
tggtaactactttaaacagtgac

SEQ ID NO: 5643 - DNA, 23 bp, Artificial Sequence
  human ApoB siRNA sequence
ggtaactactttaaacagtgacc

SEQ ID NO: 5644 - DNA, 23 bp, Artificial Sequence
  human ApoB siRNA sequence
gtaactactttaaacagtgacct

SEQ ID NO: 5645 - DNA, 23 bp, Artificial Sequence
  human ApoB siRNA sequence
taactactttaaacagtgacctg

SEQ ID NO: 5646 - DNA, 23 bp, Artificial Sequence
  human ApoB siRNA sequence
aactactttaaacagtgacctga

SEQ ID NO: 5647 - DNA, 23 bp, Artificial Sequence
  human ApoB siRNA sequence
actactttaaacagtgacctgaa

SEQ ID NO: 5648 - DNA, 23 bp, Artificial Sequence
  human ApoB siRNA sequence
ctactttaaacagtgacctgaaa

SEQ ID NO: 5649 - DNA, 23 bp, Artificial Sequence
  human ApoB siRNA sequence
tactttaaacagtgacctgaaat

SEQ ID NO: 5650 - DNA, 23 bp, Artificial Sequence
  human ApoB siRNA sequence
actttaaacagtgacctgaaata

SEQ ID NO: 5651 - DNA, 23 bp, Artificial Sequence
  human ApoB siRNA sequence
ctttaaacagtgacctgaaatac

SEQ ID NO: 5652 - DNA, 23 bp, Artificial Sequence
  human ApoB siRNA sequence
tttaaacagtgacctgaaataca

SEQ ID NO: 5653 - DNA, 23 bp, Artificial Sequence
  human ApoB siRNA sequence
ttaaacagtgacctgaaatacaa

SEQ ID NO: 5654 - DNA, 23 bp, Artificial Sequence
  human ApoB siRNA sequence
taaacagtgacctgaaatacaat

SEQ ID NO: 5655 - DNA, 23 bp, Artificial Sequence
  human ApoB siRNA sequence
aaacagtgacctgaaatacaatg

SEQ ID NO: 5656 - DNA, 23 bp, Artificial Sequence
  human ApoB siRNA sequence
aacagtgacctgaaatacaatgc

SEQ ID NO: 5657 - DNA, 23 bp, Artificial Sequence
  human ApoB siRNA sequence
acagtgacctgaaatacaatgct

SEQ ID NO: 5658 - DNA, 23 bp, Artificial Sequence
  human ApoB siRNA sequence
cagtgacctgaaatacaatgctc

SEQ ID NO: 5659 - DNA, 23 bp, Artificial Sequence
  human ApoB siRNA sequence
agtgacctgaaatacaatgctct

SEQ ID NO: 5660 - DNA, 23 bp, Artificial Sequence
  human ApoB siRNA sequence
gtgacctgaaatacaatgctctg

SEQ ID NO: 5661 - DNA, 23 bp, Artificial Sequence
  human ApoB siRNA sequence
tgacctgaaatacaatgctctgg

SEQ ID NO: 5662 - DNA, 23 bp, Artificial Sequence
  human ApoB siRNA sequence
gacctgaaatacaatgctctgga

SEQ ID NO: 5663 - DNA, 23 bp, Artificial Sequence
  human ApoB siRNA sequence
acctgaaatacaatgctctggat

SEQ ID NO: 5664 - DNA, 23 bp, Artificial Sequence
  human ApoB siRNA sequence
cctgaaatacaatgctctggatc

SEQ ID NO: 5665 - DNA, 23 bp, Artificial Sequence
  human ApoB siRNA sequence
ctgaaatacaatgctctggatct

SEQ ID NO: 5666 - DNA, 23 bp, Artificial Sequence
  human ApoB siRNA sequence
tgaaatacaatgctctggatctc

SEQ ID NO: 5667 - DNA, 23 bp, Artificial Sequence
  human ApoB siRNA sequence
gaaatacaatgctctggatctca

SEQ ID NO: 5668 - DNA, 23 bp, Artificial Sequence
  human ApoB siRNA sequence
aaatacaatgctctggatctcac

SEQ ID NO: 5669 - DNA, 23 bp, Artificial Sequence
  human ApoB siRNA sequence
aatacaatgctctggatctcacc

SEQ ID NO: 5670 - DNA, 23 bp, Artificial Sequence
  human ApoB siRNA sequence
atacaatgctctggatctcacca

SEQ ID NO: 5671 - DNA, 23 bp, Artificial Sequence
  human ApoB siRNA sequence
tacaatgctctggatctcaccaa

SEQ ID NO: 5672 - DNA, 23 bp, Artificial Sequence
  human ApoB siRNA sequence
acaatgctctggatctcaccaac

SEQ ID NO: 5673 - DNA, 23 bp, Artificial Sequence
  human ApoB siRNA sequence
caatgctctggatctcaccaaca

SEQ ID NO: 5674 - DNA, 23 bp, Artificial Sequence
  human ApoB siRNA sequence
aatgctctggatctcaccaacaa

SEQ ID NO: 5675 - DNA, 23 bp, Artificial Sequence
  human ApoB siRNA sequence
atgctctggatctcaccaacaat

SEQ ID NO: 5676 - DNA, 23 bp, Artificial Sequence
  human ApoB siRNA sequence
tgctctggatctcaccaacaatg

SEQ ID NO: 5677 - DNA, 23 bp, Artificial Sequence
  human ApoB siRNA sequence
gctctggatctcaccaacaatgg

SEQ ID NO: 5678 - DNA, 23 bp, Artificial Sequence
  human ApoB siRNA sequence
ctctggatctcaccaacaatggg

SEQ ID NO: 5679 - DNA, 23 bp, Artificial Sequence
  human ApoB siRNA sequence
tctggatctcaccaacaatggga

SEQ ID NO: 5680 - DNA, 23 bp, Artificial Sequence
  human ApoB siRNA sequence
ctggatctcaccaacaatgggaa

SEQ ID NO: 5681 - DNA, 23 bp, Artificial Sequence
  human ApoB siRNA sequence
tggatctcaccaacaatgggaaa

SEQ ID NO: 5682 - DNA, 23 bp, Artificial Sequence
  human ApoB siRNA sequence
ggatctcaccaacaatgggaaac

SEQ ID NO: 5683 - DNA, 23 bp, Artificial Sequence
  human ApoB siRNA sequence
gatctcaccaacaatgggaaact

SEQ ID NO: 5684 - DNA, 23 bp, Artificial Sequence
  human ApoB siRNA sequence
atctcaccaacaatgggaaacta

SEQ ID NO: 5685 - DNA, 23 bp, Artificial Sequence
  human ApoB siRNA sequence
tctcaccaacaatgggaaactac

SEQ ID NO: 5686 - DNA, 23 bp, Artificial Sequence
  human ApoB siRNA sequence
ctcaccaacaatgggaaactacg

SEQ ID NO: 5687 - DNA, 23 bp, Artificial Sequence
  human ApoB siRNA sequence
tcaccaacaatgggaaactacgg

SEQ ID NO: 5688 - DNA, 23 bp, Artificial Sequence
  human ApoB siRNA sequence
caccaacaatgggaaactacggc

SEQ ID NO: 5689 - DNA, 23 bp, Artificial Sequence
  human ApoB siRNA sequence
accaacaatgggaaactacggct

SEQ ID NO: 5690 - DNA, 23 bp, Artificial Sequence
  human ApoB siRNA sequence
ccaacaatgggaaactacggcta

SEQ ID NO: 5691 - DNA, 23 bp, Artificial Sequence
  human ApoB siRNA sequence
caacaatgggaaactacggctag

SEQ ID NO: 5692 - DNA, 23 bp, Artificial Sequence
  human ApoB siRNA sequence
aacaatgggaaactacggctaga

SEQ ID NO: 5693 - DNA, 23 bp, Artificial Sequence
  human ApoB siRNA sequence
acaatgggaaactacggctagaa

SEQ ID NO: 5694 - DNA, 23 bp, Artificial Sequence
  human ApoB siRNA sequence
caatgggaaactacggctagaac

SEQ ID NO: 5695 - DNA, 23 bp, Artificial Sequence
  human ApoB siRNA sequence
aatgggaaactacggctagaacc

SEQ ID NO: 5696 - DNA, 23 bp, Artificial Sequence
  human ApoB siRNA sequence
atgggaaactacggctagaaccc

SEQ ID NO: 5697 - DNA, 23 bp, Artificial Sequence
  human ApoB siRNA sequence
tgggaaactacggctagaacccc

SEQ ID NO: 5698 - DNA, 23 bp, Artificial Sequence
  human ApoB siRNA sequence
gggaaactacggctagaacccct

SEQ ID NO: 5699 - DNA, 23 bp, Artificial Sequence
  human ApoB siRNA sequence
ggaaactacggctagaacccctg

SEQ ID NO: 5700 - DNA, 23 bp, Artificial Sequence
  human ApoB siRNA sequence
gaaactacggctagaacccctga

SEQ ID NO: 5701 - DNA, 23 bp, Artificial Sequence
  human ApoB siRNA sequence
aaactacggctagaacccctgaa

SEQ ID NO: 5702 - DNA, 23 bp, Artificial Sequence
  human ApoB siRNA sequence
aactacggctagaacccctgaag

SEQ ID NO: 5703 - DNA, 23 bp, Artificial Sequence
  human ApoB siRNA sequence
actacggctagaacccctgaagc

SEQ ID NO: 5704 - DNA, 23 bp, Artificial Sequence
  human ApoB siRNA sequence
ctacggctagaacccctgaagct

SEQ ID NO: 5705 - DNA, 23 bp, Artificial Sequence
  human ApoB siRNA sequence
tacggctagaacccctgaagctg

SEQ ID NO: 5706 - DNA, 23 bp, Artificial Sequence
  human ApoB siRNA sequence
acggctagaacccctgaagctgc

SEQ ID NO: 5707 - DNA, 23 bp, Artificial Sequence
  human ApoB siRNA sequence
cggctagaacccctgaagctgca

SEQ ID NO: 5708 - DNA, 23 bp, Artificial Sequence
  human ApoB siRNA sequence
ggctagaacccctgaagctgcat

SEQ ID NO: 5709 - DNA, 23 bp, Artificial Sequence
  human ApoB siRNA sequence
gctagaacccctgaagctgcatg

SEQ ID NO: 5710 - DNA, 23 bp, Artificial Sequence
  human ApoB siRNA sequence
ctagaacccctgaagctgcatgt

SEQ ID NO: 5711 - DNA, 23 bp, Artificial Sequence
  human ApoB siRNA sequence
tagaacccctgaagctgcatgtg

SEQ ID NO: 5712 - DNA, 23 bp, Artificial Sequence
  human ApoB siRNA sequence
agaacccctgaagctgcatgtgg

SEQ ID NO: 5713 - DNA, 23 bp, Artificial Sequence
  human ApoB siRNA sequence
gaacccctgaagctgcatgtggc

SEQ ID NO: 5714 - DNA, 23 bp, Artificial Sequence
  human ApoB siRNA sequence
aacccctgaagctgcatgtggct

SEQ ID NO: 5715 - DNA, 23 bp, Artificial Sequence
  human ApoB siRNA sequence
acccctgaagctgcatgtggctg

SEQ ID NO: 5716 - DNA, 23 bp, Artificial Sequence
  human ApoB siRNA sequence
cccctgaagctgcatgtggctgg

SEQ ID NO: 5717 - DNA, 23 bp, Artificial Sequence
  human ApoB siRNA sequence
ccctgaagctgcatgtggctggt

SEQ ID NO: 5718 - DNA, 23 bp, Artificial Sequence
  human ApoB siRNA sequence
cctgaagctgcatgtggctggta

SEQ ID NO: 5719 - DNA, 23 bp, Artificial Sequence
  human ApoB siRNA sequence
ctgaagctgcatgtggctggtaa

SEQ ID NO: 5720 - DNA, 23 bp, Artificial Sequence
  human ApoB siRNA sequence
tgaagctgcatgtggctggtaac

SEQ ID NO: 5721 - DNA, 23 bp, Artificial Sequence
  human ApoB siRNA sequence
gaagctgcatgtggctggtaacc

SEQ ID NO: 5722 - DNA, 23 bp, Artificial Sequence
  human ApoB siRNA sequence
aagctgcatgtggctggtaacct

SEQ ID NO: 5723 - DNA, 23 bp, Artificial Sequence
  human ApoB siRNA sequence
agctgcatgtggctggtaaccta

SEQ ID NO: 5724 - DNA, 23 bp, Artificial Sequence
  human ApoB siRNA sequence
gctgcatgtggctggtaacctaa

SEQ ID NO: 5725 - DNA, 23 bp, Artificial Sequence
  human ApoB siRNA sequence
ctgcatgtggctggtaacctaaa

SEQ ID NO: 5726 - DNA, 23 bp, Artificial Sequence
  human ApoB siRNA sequence
tgcatgtggctggtaacctaaaa

SEQ ID NO: 5727 - DNA, 23 bp, Artificial Sequence
  human ApoB siRNA sequence
gcatgtggctggtaacctaaaag

SEQ ID NO: 5728 - DNA, 23 bp, Artificial Sequence
  human ApoB siRNA sequence
catgtggctggtaacctaaaagg

SEQ ID NO: 5729 - DNA, 23 bp, Artificial Sequence
  human ApoB siRNA sequence
atgtggctggtaacctaaaagga

SEQ ID NO: 5730 - DNA, 23 bp, Artificial Sequence
  human ApoB siRNA sequence
tgtggctggtaacctaaaaggag

SEQ ID NO: 5731 - DNA, 23 bp, Artificial Sequence
  human ApoB siRNA sequence
gtggctggtaacctaaaaggagc

SEQ ID NO: 5732 - DNA, 23 bp, Artificial Sequence
  human ApoB siRNA sequence
tggctggtaacctaaaaggagcc

SEQ ID NO: 5733 - DNA, 23 bp, Artificial Sequence
  human ApoB siRNA sequence
ggctggtaacctaaaaggagcct

SEQ ID NO: 5734 - DNA, 23 bp, Artificial Sequence
  human ApoB siRNA sequence
gctggtaacctaaaaggagccta

SEQ ID NO: 5735 - DNA, 23 bp, Artificial Sequence
  human ApoB siRNA sequence
ctggtaacctaaaaggagcctac

SEQ ID NO: 5736 - DNA, 23 bp, Artificial Sequence
  human ApoB siRNA sequence
tggtaacctaaaaggagcctacc

SEQ ID NO: 5737 - DNA, 23 bp, Artificial Sequence
  human ApoB siRNA sequence
ggtaacctaaaaggagcctacca

SEQ ID NO: 5738 - DNA, 23 bp, Artificial Sequence
  human ApoB siRNA sequence
gtaacctaaaaggagcctaccaa

SEQ ID NO: 5739 - DNA, 23 bp, Artificial Sequence
  human ApoB siRNA sequence
taacctaaaaggagcctaccaaa

SEQ ID NO: 5740 - DNA, 23 bp, Artificial Sequence
  human ApoB siRNA sequence
aacctaaaaggagcctaccaaaa

SEQ ID NO: 5741 - DNA, 23 bp, Artificial Sequence
  human ApoB siRNA sequence
acctaaaaggagcctaccaaaat

SEQ ID NO: 5742 - DNA, 23 bp, Artificial Sequence
  human ApoB siRNA sequence
cctaaaaggagcctaccaaaata

SEQ ID NO: 5743 - DNA, 23 bp, Artificial Sequence
  human ApoB siRNA sequence
ctaaaaggagcctaccaaaataa

SEQ ID NO: 5744 - DNA, 23 bp, Artificial Sequence
  human ApoB siRNA sequence
taaaaggagcctaccaaaataat

SEQ ID NO: 5745 - DNA, 23 bp, Artificial Sequence
  human ApoB siRNA sequence
aaaaggagcctaccaaaataatg

SEQ ID NO: 5746 - DNA, 23 bp, Artificial Sequence
  human ApoB siRNA sequence
aaaggagcctaccaaaataatga

SEQ ID NO: 5747 - DNA, 23 bp, Artificial Sequence
  human ApoB siRNA sequence
aaggagcctaccaaaataatgaa

SEQ ID NO: 5748 - DNA, 23 bp, Artificial Sequence
  human ApoB siRNA sequence
aggagcctaccaaaataatgaaa

SEQ ID NO: 5749 - DNA, 23 bp, Artificial Sequence
  human ApoB siRNA sequence
ggagcctaccaaaataatgaaat

SEQ ID NO: 5750 - DNA, 23 bp, Artificial Sequence
  human ApoB siRNA sequence
gagcctaccaaaataatgaaata

SEQ ID NO: 5751 - DNA, 23 bp, Artificial Sequence
  human ApoB siRNA sequence
agcctaccaaaataatgaaataa

SEQ ID NO: 5752 - DNA, 23 bp, Artificial Sequence
  human ApoB siRNA sequence
gcctaccaaaataatgaaataaa

SEQ ID NO: 5753 - DNA, 23 bp, Artificial Sequence
  human ApoB siRNA sequence
cctaccaaaataatgaaataaaa

SEQ ID NO: 5754 - DNA, 23 bp, Artificial Sequence
  human ApoB siRNA sequence
ctaccaaaataatgaaataaaac

SEQ ID NO: 5755 - DNA, 23 bp, Artificial Sequence
  human ApoB siRNA sequence
taccaaaataatgaaataaaaca

SEQ ID NO: 5756 - DNA, 23 bp, Artificial Sequence
  human ApoB siRNA sequence
accaaaataatgaaataaaacac

SEQ ID NO: 5757 - DNA, 23 bp, Artificial Sequence
  human ApoB siRNA sequence
ccaaaataatgaaataaaacaca

SEQ ID NO: 5758 - DNA, 23 bp, Artificial Sequence
  human ApoB siRNA sequence
caaaataatgaaataaaacacat

SEQ ID NO: 5759 - DNA, 23 bp, Artificial Sequence
  human ApoB siRNA sequence
aaaataatgaaataaaacacatc

SEQ ID NO: 5760 - DNA, 23 bp, Artificial Sequence
  human ApoB siRNA sequence
aaataatgaaataaaacacatct

SEQ ID NO: 5761 - DNA, 23 bp, Artificial Sequence
  human ApoB siRNA sequence
aataatgaaataaaacacatcta

SEQ ID NO: 5762 - DNA, 23 bp, Artificial Sequence
  human ApoB siRNA sequence
ataatgaaataaaacacatctat

SEQ ID NO: 5763 - DNA, 23 bp, Artificial Sequence
  human ApoB siRNA sequence
taatgaaataaaacacatctatg

SEQ ID NO: 5764 - DNA, 23 bp, Artificial Sequence
  human ApoB siRNA sequence
aatgaaataaaacacatctatgc

SEQ ID NO: 5765 - DNA, 23 bp, Artificial Sequence
  human ApoB siRNA sequence
atgaaataaaacacatctatgcc

SEQ ID NO: 5766 - DNA, 23 bp, Artificial Sequence
  human ApoB siRNA sequence
tgaaataaaacacatctatgcca

SEQ ID NO: 5767 - DNA, 23 bp, Artificial Sequence
  human ApoB siRNA sequence
gaaataaaacacatctatgccat

SEQ ID NO: 5768 - DNA, 23 bp, Artificial Sequence
  human ApoB siRNA sequence
aaataaaacacatctatgccatc

SEQ ID NO: 5769 - DNA, 23 bp, Artificial Sequence
  human ApoB siRNA sequence
aataaaacacatctatgccatct

SEQ ID NO: 5770 - DNA, 23 bp, Artificial Sequence
  human ApoB siRNA sequence
ataaaacacatctatgccatctc

SEQ ID NO: 5771 - DNA, 23 bp, Artificial Sequence
  human ApoB siRNA sequence
taaaacacatctatgccatctct

SEQ ID NO: 5772 - DNA, 23 bp, Artificial Sequence
  human ApoB siRNA sequence
aaaacacatctatgccatctctt

SEQ ID NO: 5773 - DNA, 23 bp, Artificial Sequence
  human ApoB siRNA sequence
aaacacatctatgccatctcttc

SEQ ID NO: 5774 - DNA, 23 bp, Artificial Sequence
  human ApoB siRNA sequence
aacacatctatgccatctcttct

SEQ ID NO: 5775 - DNA, 23 bp, Artificial Sequence
  human ApoB siRNA sequence
acacatctatgccatctcttctg

SEQ ID NO: 5776 - DNA, 23 bp, Artificial Sequence
  human ApoB siRNA sequence
cacatctatgccatctcttctgc

SEQ ID NO: 5777 - DNA, 23 bp, Artificial Sequence
  human ApoB siRNA sequence
acatctatgccatctcttctgct

SEQ ID NO: 5778 - DNA, 23 bp, Artificial Sequence
  human ApoB siRNA sequence
catctatgccatctcttctgctg

SEQ ID NO: 5779 - DNA, 23 bp, Artificial Sequence
  human ApoB siRNA sequence
atctatgccatctcttctgctgc

SEQ ID NO: 5780 - DNA, 23 bp, Artificial Sequence
  human ApoB siRNA sequence
tctatgccatctcttctgctgcc

SEQ ID NO: 5781 - DNA, 23 bp, Artificial Sequence
  human ApoB siRNA sequence
ctatgccatctcttctgctgcct

SEQ ID NO: 5782 - DNA, 23 bp, Artificial Sequence
  human ApoB siRNA sequence
tatgccatctcttctgctgcctt

SEQ ID NO: 5783 - DNA, 23 bp, Artificial Sequence
  human ApoB siRNA sequence
atgccatctcttctgctgcctta

SEQ ID NO: 5784 - DNA, 23 bp, Artificial Sequence
  human ApoB siRNA sequence
tgccatctcttctgctgccttat

SEQ ID NO: 5785 - DNA, 23 bp, Artificial Sequence
  human ApoB siRNA sequence
gccatctcttctgctgccttatc

SEQ ID NO: 5786 - DNA, 23 bp, Artificial Sequence
  human ApoB siRNA sequence
ccatctcttctgctgccttatca

SEQ ID NO: 5787 - DNA, 23 bp, Artificial Sequence
  human ApoB siRNA sequence
catctcttctgctgccttatcag

SEQ ID NO: 5788 - DNA, 23 bp, Artificial Sequence
  human ApoB siRNA sequence
atctcttctgctgccttatcagc

SEQ ID NO: 5789 - DNA, 23 bp, Artificial Sequence
  human ApoB siRNA sequence
tctcttctgctgccttatcagca

SEQ ID NO: 5790 - DNA, 23 bp, Artificial Sequence
  human ApoB siRNA sequence
ctcttctgctgccttatcagcaa

SEQ ID NO: 5791 - DNA, 23 bp, Artificial Sequence
  human ApoB siRNA sequence
tcttctgctgccttatcagcaag

SEQ ID NO: 5792 - DNA, 23 bp, Artificial Sequence
  human ApoB siRNA sequence
cttctgctgccttatcagcaagc

SEQ ID NO: 5793 - DNA, 23 bp, Artificial Sequence
  human ApoB siRNA sequence
ttctgctgccttatcagcaagct

SEQ ID NO: 5794 - DNA, 23 bp, Artificial Sequence
  human ApoB siRNA sequence
tctgctgccttatcagcaagcta

SEQ ID NO: 5795 - DNA, 23 bp, Artificial Sequence
  human ApoB siRNA sequence
ctgctgccttatcagcaagctat

SEQ ID NO: 5796 - DNA, 23 bp, Artificial Sequence
  human ApoB siRNA sequence
tgctgccttatcagcaagctata

SEQ ID NO: 5797 - DNA, 23 bp, Artificial Sequence
  human ApoB siRNA sequence
gctgccttatcagcaagctataa

SEQ ID NO: 5798 - DNA, 23 bp, Artificial Sequence
  human ApoB siRNA sequence
ctgccttatcagcaagctataaa

SEQ ID NO: 5799 - DNA, 23 bp, Artificial Sequence
  human ApoB siRNA sequence
tgccttatcagcaagctataaag

SEQ ID NO: 5800 - DNA, 23 bp, Artificial Sequence
  human ApoB siRNA sequence
gccttatcagcaagctataaagc

SEQ ID NO: 5801 - DNA, 23 bp, Artificial Sequence
  human ApoB siRNA sequence
ccttatcagcaagctataaagca

SEQ ID NO: 5802 - DNA, 23 bp, Artificial Sequence
  human ApoB siRNA sequence
cttatcagcaagctataaagcag

SEQ ID NO: 5803 - DNA, 23 bp, Artificial Sequence
  human ApoB siRNA sequence
ttatcagcaagctataaagcaga

SEQ ID NO: 5804 - DNA, 23 bp, Artificial Sequence
  human ApoB siRNA sequence
tatcagcaagctataaagcagac

SEQ ID NO: 5805 - DNA, 23 bp, Artificial Sequence
  human ApoB siRNA sequence
atcagcaagctataaagcagaca

SEQ ID NO: 5806 - DNA, 23 bp, Artificial Sequence
  human ApoB siRNA sequence
tcagcaagctataaagcagacac

SEQ ID NO: 5807 - DNA, 23 bp, Artificial Sequence
  human ApoB siRNA sequence
cagcaagctataaagcagacact

SEQ ID NO: 5808 - DNA, 23 bp, Artificial Sequence
  human ApoB siRNA sequence
agcaagctataaagcagacactg

SEQ ID NO: 5809 - DNA, 23 bp, Artificial Sequence
  human ApoB siRNA sequence
gcaagctataaagcagacactgt

SEQ ID NO: 5810 - DNA, 23 bp, Artificial Sequence
  human ApoB siRNA sequence
caagctataaagcagacactgtt

SEQ ID NO: 5811 - DNA, 23 bp, Artificial Sequence
  human ApoB siRNA sequence
aagctataaagcagacactgttg

SEQ ID NO: 5812 - DNA, 23 bp, Artificial Sequence
  human ApoB siRNA sequence
agctataaagcagacactgttgc

SEQ ID NO: 5813 - DNA, 23 bp, Artificial Sequence
  human ApoB siRNA sequence
gctataaagcagacactgttgct

SEQ ID NO: 5814 - DNA, 23 bp, Artificial Sequence
  human ApoB siRNA sequence
ctataaagcagacactgttgcta

SEQ ID NO: 5815 - DNA, 23 bp, Artificial Sequence
  human ApoB siRNA sequence
tataaagcagacactgttgctaa

SEQ ID NO: 5816 - DNA, 23 bp, Artificial Sequence
  human ApoB siRNA sequence
ataaagcagacactgttgctaag

SEQ ID NO: 5817 - DNA, 23 bp, Artificial Sequence
  human ApoB siRNA sequence
taaagcagacactgttgctaagg

SEQ ID NO: 5818 - DNA, 23 bp, Artificial Sequence
  human ApoB siRNA sequence
aaagcagacactgttgctaaggt

SEQ ID NO: 5819 - DNA, 23 bp, Artificial Sequence
  human ApoB siRNA sequence
aagcagacactgttgctaaggtt

SEQ ID NO: 5820 - DNA, 23 bp, Artificial Sequence
  human ApoB siRNA sequence
agcagacactgttgctaaggttc

SEQ ID NO: 5821 - DNA, 23 bp, Artificial Sequence
  human ApoB siRNA sequence
gcagacactgttgctaaggttca

SEQ ID NO: 5822 - DNA, 23 bp, Artificial Sequence
  human ApoB siRNA sequence
cagacactgttgctaaggttcag

SEQ ID NO: 5823 - DNA, 23 bp, Artificial Sequence
  human ApoB siRNA sequence
agacactgttgctaaggttcagg

SEQ ID NO: 5824 - DNA, 23 bp, Artificial Sequence
  human ApoB siRNA sequence
gacactgttgctaaggttcaggg

SEQ ID NO: 5825 - DNA, 23 bp, Artificial Sequence
  human ApoB siRNA sequence
acactgttgctaaggttcagggt

SEQ ID NO: 5826 - DNA, 23 bp, Artificial Sequence
  human ApoB siRNA sequence
cactgttgctaaggttcagggtg

SEQ ID NO: 5827 - DNA, 23 bp, Artificial Sequence
  human ApoB siRNA sequence
actgttgctaaggttcagggtgt

SEQ ID NO: 5828 - DNA, 23 bp, Artificial Sequence
  human ApoB siRNA sequence
ctgttgctaaggttcagggtgtg

SEQ ID NO: 5829 - DNA, 23 bp, Artificial Sequence
  human ApoB siRNA sequence
tgttgctaaggttcagggtgtgg

SEQ ID NO: 5830 - DNA, 23 bp, Artificial Sequence
  human ApoB siRNA sequence
gttgctaaggttcagggtgtgga

SEQ ID NO: 5831 - DNA, 23 bp, Artificial Sequence
  human ApoB siRNA sequence
ttgctaaggttcagggtgtggag

SEQ ID NO: 5832 - DNA, 23 bp, Artificial Sequence
  human ApoB siRNA sequence
tgctaaggttcagggtgtggagt

SEQ ID NO: 5833 - DNA, 23 bp, Artificial Sequence
  human ApoB siRNA sequence
gctaaggttcagggtgtggagtt

SEQ ID NO: 5834 - DNA, 23 bp, Artificial Sequence
  human ApoB siRNA sequence
ctaaggttcagggtgtggagttt

SEQ ID NO: 5835 - DNA, 23 bp, Artificial Sequence
  human ApoB siRNA sequence
taaggttcagggtgtggagttta

SEQ ID NO: 5836 - DNA, 23 bp, Artificial Sequence
  human ApoB siRNA sequence
aaggttcagggtgtggagtttag

SEQ ID NO: 5837 - DNA, 23 bp, Artificial Sequence
  human ApoB siRNA sequence
aggttcagggtgtggagtttagc

SEQ ID NO: 5838 - DNA, 23 bp, Artificial Sequence
  human ApoB siRNA sequence
ggttcagggtgtggagtttagcc

SEQ ID NO: 5839 - DNA, 23 bp, Artificial Sequence
  human ApoB siRNA sequence
gttcagggtgtggagtttagcca

SEQ ID NO: 5840 - DNA, 23 bp, Artificial Sequence
  human ApoB siRNA sequence
ttcagggtgtggagtttagccat

SEQ ID NO: 5841 - DNA, 23 bp, Artificial Sequence
  human ApoB siRNA sequence
tcagggtgtggagtttagccatc

SEQ ID NO: 5842 - DNA, 23 bp, Artificial Sequence
  human ApoB siRNA sequence
cagggtgtggagtttagccatcg

SEQ ID NO: 5843 - DNA, 23 bp, Artificial Sequence
  human ApoB siRNA sequence
agggtgtggagtttagccatcgg

SEQ ID NO: 5844 - DNA, 23 bp, Artificial Sequence
  human ApoB siRNA sequence
gggtgtggagtttagccatcggc

SEQ ID NO: 5845 - DNA, 23 bp, Artificial Sequence
  human ApoB siRNA sequence
ggtgtggagtttagccatcggct

SEQ ID NO: 5846 - DNA, 23 bp, Artificial Sequence
  human ApoB siRNA sequence
gtgtggagtttagccatcggctc

SEQ ID NO: 5847 - DNA, 23 bp, Artificial Sequence
  human ApoB siRNA sequence
tgtggagtttagccatcggctca

SEQ ID NO: 5848 - DNA, 23 bp, Artificial Sequence
  human ApoB siRNA sequence
gtggagtttagccatcggctcaa

SEQ ID NO: 5849 - DNA, 23 bp, Artificial Sequence
  human ApoB siRNA sequence
tggagtttagccatcggctcaac

SEQ ID NO: 5850 - DNA, 23 bp, Artificial Sequence
  human ApoB siRNA sequence
ggagtttagccatcggctcaaca

SEQ ID NO: 5851 - DNA, 23 bp, Artificial Sequence
  human ApoB siRNA sequence
gagtttagccatcggctcaacac

SEQ ID NO: 5852 - DNA, 23 bp, Artificial Sequence
  human ApoB siRNA sequence
agtttagccatcggctcaacaca

SEQ ID NO: 5853 - DNA, 23 bp, Artificial Sequence
  human ApoB siRNA sequence
gtttagccatcggctcaacacag

SEQ ID NO: 5854 - DNA, 23 bp, Artificial Sequence
  human ApoB siRNA sequence
tttagccatcggctcaacacaga

SEQ ID NO: 5855 - DNA, 23 bp, Artificial Sequence
  human ApoB siRNA sequence
ttagccatcggctcaacacagac

SEQ ID NO: 5856 - DNA, 23 bp, Artificial Sequence
  human ApoB siRNA sequence
tagccatcggctcaacacagaca

SEQ ID NO: 5857 - DNA, 23 bp, Artificial Sequence
  human ApoB siRNA sequence
agccatcggctcaacacagacat

SEQ ID NO: 5858 - DNA, 23 bp, Artificial Sequence
  human ApoB siRNA sequence
gccatcggctcaacacagacatc

SEQ ID NO: 5859 - DNA, 23 bp, Artificial Sequence
  human ApoB siRNA sequence
ccatcggctcaacacagacatcg

SEQ ID NO: 5860 - DNA, 23 bp, Artificial Sequence
  human ApoB siRNA sequence
catcggctcaacacagacatcgc

SEQ ID NO: 5861 - DNA, 23 bp, Artificial Sequence
  human ApoB siRNA sequence
atcggctcaacacagacatcgct

SEQ ID NO: 5862 - DNA, 23 bp, Artificial Sequence
  human ApoB siRNA sequence
tcggctcaacacagacatcgctg

SEQ ID NO: 5863 - DNA, 23 bp, Artificial Sequence
  human ApoB siRNA sequence
cggctcaacacagacatcgctgg

SEQ ID NO: 5864 - DNA, 23 bp, Artificial Sequence
  human ApoB siRNA sequence
ggctcaacacagacatcgctggg

SEQ ID NO: 5865 - DNA, 23 bp, Artificial Sequence
  human ApoB siRNA sequence
gctcaacacagacatcgctgggc

SEQ ID NO: 5866 - DNA, 23 bp, Artificial Sequence
  human ApoB siRNA sequence
ctcaacacagacatcgctgggct

SEQ ID NO: 5867 - DNA, 23 bp, Artificial Sequence
  human ApoB siRNA sequence
tcaacacagacatcgctgggctg

SEQ ID NO: 5868 - DNA, 23 bp, Artificial Sequence
  human ApoB siRNA sequence
caacacagacatcgctgggctgg

SEQ ID NO: 5869 - DNA, 23 bp, Artificial Sequence
  human ApoB siRNA sequence
aacacagacatcgctgggctggc

SEQ ID NO: 5870 - DNA, 23 bp, Artificial Sequence
  human ApoB siRNA sequence
acacagacatcgctgggctggct

SEQ ID NO: 5871 - DNA, 23 bp, Artificial Sequence
  human ApoB siRNA sequence
cacagacatcgctgggctggctt

SEQ ID NO: 5872 - DNA, 23 bp, Artificial Sequence
  human ApoB siRNA sequence
acagacatcgctgggctggcttc

SEQ ID NO: 5873 - DNA, 23 bp, Artificial Sequence
  human ApoB siRNA sequence
cagacatcgctgggctggcttca

SEQ ID NO: 5874 - DNA, 23 bp, Artificial Sequence
  human ApoB siRNA sequence
agacatcgctgggctggcttcag

SEQ ID NO: 5875 - DNA, 23 bp, Artificial Sequence
  human ApoB siRNA sequence
gacatcgctgggctggcttcagc

SEQ ID NO: 5876 - DNA, 23 bp, Artificial Sequence
  human ApoB siRNA sequence
acatcgctgggctggcttcagcc

SEQ ID NO: 5877 - DNA, 23 bp, Artificial Sequence
  human ApoB siRNA sequence
catcgctgggctggcttcagcca

SEQ ID NO: 5878 - DNA, 23 bp, Artificial Sequence
  human ApoB siRNA sequence
atcgctgggctggcttcagccat

SEQ ID NO: 5879 - DNA, 23 bp, Artificial Sequence
  human ApoB siRNA sequence
tcgctgggctggcttcagccatt

SEQ ID NO: 5880 - DNA, 23 bp, Artificial Sequence
  human ApoB siRNA sequence
cgctgggctggcttcagccattg

SEQ ID NO: 5881 - DNA, 23 bp, Artificial Sequence
  human ApoB siRNA sequence
gctgggctggcttcagccattga

SEQ ID NO: 5882 - DNA, 23 bp, Artificial Sequence
  human ApoB siRNA sequence
ctgggctggcttcagccattgac

SEQ ID NO: 5883 - DNA, 23 bp, Artificial Sequence
  human ApoB siRNA sequence
tgggctggcttcagccattgaca

SEQ ID NO: 5884 - DNA, 23 bp, Artificial Sequence
  human ApoB siRNA sequence
gggctggcttcagccattgacat

SEQ ID NO: 5885 - DNA, 23 bp, Artificial Sequence
  human ApoB siRNA sequence
ggctggcttcagccattgacatg

SEQ ID NO: 5886 - DNA, 23 bp, Artificial Sequence
  human ApoB siRNA sequence
gctggcttcagccattgacatga

SEQ ID NO: 5887 - DNA, 23 bp, Artificial Sequence
  human ApoB siRNA sequence
ctggcttcagccattgacatgag

SEQ ID NO: 5888 - DNA, 23 bp, Artificial Sequence
  human ApoB siRNA sequence
tggcttcagccattgacatgagc

SEQ ID NO: 5889 - DNA, 23 bp, Artificial Sequence
  human ApoB siRNA sequence
ggcttcagccattgacatgagca

SEQ ID NO: 5890 - DNA, 23 bp, Artificial Sequence
  human ApoB siRNA sequence
gcttcagccattgacatgagcac

SEQ ID NO: 5891 - DNA, 23 bp, Artificial Sequence
  human ApoB siRNA sequence
cttcagccattgacatgagcaca

SEQ ID NO: 5892 - DNA, 23 bp, Artificial Sequence
  human ApoB siRNA sequence
ttcagccattgacatgagcacaa

SEQ ID NO: 5893 - DNA, 23 bp, Artificial Sequence
  human ApoB siRNA sequence
tcagccattgacatgagcacaaa

SEQ ID NO: 5894 - DNA, 23 bp, Artificial Sequence
  human ApoB siRNA sequence
cagccattgacatgagcacaaac

SEQ ID NO: 5895 - DNA, 23 bp, Artificial Sequence
  human ApoB siRNA sequence
agccattgacatgagcacaaact

SEQ ID NO: 5896 - DNA, 23 bp, Artificial Sequence
  human ApoB siRNA sequence
gccattgacatgagcacaaacta

SEQ ID NO: 5897 - DNA, 23 bp, Artificial Sequence
  human ApoB siRNA sequence
ccattgacatgagcacaaactat

SEQ ID NO: 5898 - DNA, 23 bp, Artificial Sequence
  human ApoB siRNA sequence
cattgacatgagcacaaactata

SEQ ID NO: 5899 - DNA, 23 bp, Artificial Sequence
  human ApoB siRNA sequence
attgacatgagcacaaactataa

SEQ ID NO: 5900 - DNA, 23 bp, Artificial Sequence
  human ApoB siRNA sequence
ttgacatgagcacaaactataat

SEQ ID NO: 5901 - DNA, 23 bp, Artificial Sequence
  human ApoB siRNA sequence
tgacatgagcacaaactataatt

SEQ ID NO: 5902 - DNA, 23 bp, Artificial Sequence
  human ApoB siRNA sequence
gacatgagcacaaactataattc

SEQ ID NO: 5903 - DNA, 23 bp, Artificial Sequence
  human ApoB siRNA sequence
acatgagcacaaactataattca

SEQ ID NO: 5904 - DNA, 23 bp, Artificial Sequence
  human ApoB siRNA sequence
catgagcacaaactataattcag

SEQ ID NO: 5905 - DNA, 23 bp, Artificial Sequence
  human ApoB siRNA sequence
atgagcacaaactataattcaga

SEQ ID NO: 5906 - DNA, 23 bp, Artificial Sequence
  human ApoB siRNA sequence
tgagcacaaactataattcagac

SEQ ID NO: 5907 - DNA, 23 bp, Artificial Sequence
  human ApoB siRNA sequence
gagcacaaactataattcagact

SEQ ID NO: 5908 - DNA, 23 bp, Artificial Sequence
  human ApoB siRNA sequence
agcacaaactataattcagactc

SEQ ID NO: 5909 - DNA, 23 bp, Artificial Sequence
  human ApoB siRNA sequence
gcacaaactataattcagactca

SEQ ID NO: 5910 - DNA, 23 bp, Artificial Sequence
  human ApoB siRNA sequence
cacaaactataattcagactcac

SEQ ID NO: 5911 - DNA, 23 bp, Artificial Sequence
  human ApoB siRNA sequence
acaaactataattcagactcact

SEQ ID NO: 5912 - DNA, 23 bp, Artificial Sequence
  human ApoB siRNA sequence
caaactataattcagactcactg

SEQ ID NO: 5913 - DNA, 23 bp, Artificial Sequence
  human ApoB siRNA sequence
aaactataattcagactcactgc

SEQ ID NO: 5914 - DNA, 23 bp, Artificial Sequence
  human ApoB siRNA sequence
aactataattcagactcactgca

SEQ ID NO: 5915 - DNA, 23 bp, Artificial Sequence
  human ApoB siRNA sequence
actataattcagactcactgcat

SEQ ID NO: 5916 - DNA, 23 bp, Artificial Sequence
  human ApoB siRNA sequence
ctataattcagactcactgcatt

SEQ ID NO: 5917 - DNA, 23 bp, Artificial Sequence
  human ApoB siRNA sequence
tataattcagactcactgcattt

SEQ ID NO: 5918 - DNA, 23 bp, Artificial Sequence
  human ApoB siRNA sequence
ataattcagactcactgcatttc

SEQ ID NO: 5919 - DNA, 23 bp, Artificial Sequence
  human ApoB siRNA sequence
taattcagactcactgcatttca

SEQ ID NO: 5920 - DNA, 23 bp, Artificial Sequence
  human ApoB siRNA sequence
aattcagactcactgcatttcag

SEQ ID NO: 5921 - DNA, 23 bp, Artificial Sequence
  human ApoB siRNA sequence
attcagactcactgcatttcagc

SEQ ID NO: 5922 - DNA, 23 bp, Artificial Sequence
  human ApoB siRNA sequence
ttcagactcactgcatttcagca

SEQ ID NO: 5923 - DNA, 23 bp, Artificial Sequence
  human ApoB siRNA sequence
tcagactcactgcatttcagcaa

SEQ ID NO: 5924 - DNA, 23 bp, Artificial Sequence
  human ApoB siRNA sequence
cagactcactgcatttcagcaat

SEQ ID NO: 5925 - DNA, 23 bp, Artificial Sequence
  human ApoB siRNA sequence
agactcactgcatttcagcaatg

SEQ ID NO: 5926 - DNA, 23 bp, Artificial Sequence
  human ApoB siRNA sequence
gactcactgcatttcagcaatgt

SEQ ID NO: 5927 - DNA, 23 bp, Artificial Sequence
  human ApoB siRNA sequence
actcactgcatttcagcaatgtc

SEQ ID NO: 5928 - DNA, 23 bp, Artificial Sequence
  human ApoB siRNA sequence
ctcactgcatttcagcaatgtct

SEQ ID NO: 5929 - DNA, 23 bp, Artificial Sequence
  human ApoB siRNA sequence
tcactgcatttcagcaatgtctt

SEQ ID NO: 5930 - DNA, 23 bp, Artificial Sequence
  human ApoB siRNA sequence
cactgcatttcagcaatgtcttc

SEQ ID NO: 5931 - DNA, 23 bp, Artificial Sequence
  human ApoB siRNA sequence
actgcatttcagcaatgtcttcc

SEQ ID NO: 5932 - DNA, 23 bp, Artificial Sequence
  human ApoB siRNA sequence
ctgcatttcagcaatgtcttccg

SEQ ID NO: 5933 - DNA, 23 bp, Artificial Sequence
  human ApoB siRNA sequence
tgcatttcagcaatgtcttccgt

SEQ ID NO: 5934 - DNA, 23 bp, Artificial Sequence
  human ApoB siRNA sequence
gcatttcagcaatgtcttccgtt

SEQ ID NO: 5935 - DNA, 23 bp, Artificial Sequence
  human ApoB siRNA sequence
catttcagcaatgtcttccgttc

SEQ ID NO: 5936 - DNA, 23 bp, Artificial Sequence
  human ApoB siRNA sequence
atttcagcaatgtcttccgttct

SEQ ID NO: 5937 - DNA, 23 bp, Artificial Sequence
  human ApoB siRNA sequence
tttcagcaatgtcttccgttctg

SEQ ID NO: 5938 - DNA, 23 bp, Artificial Sequence
  human ApoB siRNA sequence
ttcagcaatgtcttccgttctgt

SEQ ID NO: 5939 - DNA, 23 bp, Artificial Sequence
  human ApoB siRNA sequence
tcagcaatgtcttccgttctgta

SEQ ID NO: 5940 - DNA, 23 bp, Artificial Sequence
  human ApoB siRNA sequence
cagcaatgtcttccgttctgtaa

SEQ ID NO: 5941 - DNA, 23 bp, Artificial Sequence
  human ApoB siRNA sequence
agcaatgtcttccgttctgtaat

SEQ ID NO: 5942 - DNA, 23 bp, Artificial Sequence
  human ApoB siRNA sequence
gcaatgtcttccgttctgtaatg

SEQ ID NO: 5943 - DNA, 23 bp, Artificial Sequence
  human ApoB siRNA sequence
caatgtcttccgttctgtaatgg

SEQ ID NO: 5944 - DNA, 23 bp, Artificial Sequence
  human ApoB siRNA sequence
aatgtcttccgttctgtaatggc

SEQ ID NO: 5945 - DNA, 23 bp, Artificial Sequence
  human ApoB siRNA sequence
atgtcttccgttctgtaatggcc

SEQ ID NO: 5946 - DNA, 23 bp, Artificial Sequence
  human ApoB siRNA sequence
tgtcttccgttctgtaatggccc

SEQ ID NO: 5947 - DNA, 23 bp, Artificial Sequence
  human ApoB siRNA sequence
gtcttccgttctgtaatggcccc

SEQ ID NO: 5948 - DNA, 23 bp, Artificial Sequence
  human ApoB siRNA sequence
tcttccgttctgtaatggccccg

SEQ ID NO: 5949 - DNA, 23 bp, Artificial Sequence
  human ApoB siRNA sequence
cttccgttctgtaatggccccgt

SEQ ID NO: 5950 - DNA, 23 bp, Artificial Sequence
  human ApoB siRNA sequence
ttccgttctgtaatggccccgtt

SEQ ID NO: 5951 - DNA, 23 bp, Artificial Sequence
  human ApoB siRNA sequence
tccgttctgtaatggccccgttt

SEQ ID NO: 5952 - DNA, 23 bp, Artificial Sequence
  human ApoB siRNA sequence
ccgttctgtaatggccccgttta

SEQ ID NO: 5953 - DNA, 23 bp, Artificial Sequence
  human ApoB siRNA sequence
cgttctgtaatggccccgtttac

SEQ ID NO: 5954 - DNA, 23 bp, Artificial Sequence
  human ApoB siRNA sequence
gttctgtaatggccccgtttacc

SEQ ID NO: 5955 - DNA, 23 bp, Artificial Sequence
  human ApoB siRNA sequence
ttctgtaatggccccgtttacca

SEQ ID NO: 5956 - DNA, 23 bp, Artificial Sequence
  human ApoB siRNA sequence
tctgtaatggccccgtttaccat

SEQ ID NO: 5957 - DNA, 23 bp, Artificial Sequence
  human ApoB siRNA sequence
ctgtaatggccccgtttaccatg

SEQ ID NO: 5958 - DNA, 23 bp, Artificial Sequence
  human ApoB siRNA sequence
tgtaatggccccgtttaccatga

SEQ ID NO: 5959 - DNA, 23 bp, Artificial Sequence
  human ApoB siRNA sequence
gtaatggccccgtttaccatgac

SEQ ID NO: 5960 - DNA, 23 bp, Artificial Sequence
  human ApoB siRNA sequence
taatggccccgtttaccatgacc

SEQ ID NO: 5961 - DNA, 23 bp, Artificial Sequence
  human ApoB siRNA sequence
aatggccccgtttaccatgacca

SEQ ID NO: 5962 - DNA, 23 bp, Artificial Sequence
  human ApoB siRNA sequence
atggccccgtttaccatgaccat

SEQ ID NO: 5963 - DNA, 23 bp, Artificial Sequence
  human ApoB siRNA sequence
tggccccgtttaccatgaccatc

SEQ ID NO: 5964 - DNA, 23 bp, Artificial Sequence
  human ApoB siRNA sequence
ggccccgtttaccatgaccatcg

SEQ ID NO: 5965 - DNA, 23 bp, Artificial Sequence
  human ApoB siRNA sequence
gccccgtttaccatgaccatcga

SEQ ID NO: 5966 - DNA, 23 bp, Artificial Sequence
  human ApoB siRNA sequence
ccccgtttaccatgaccatcgat

SEQ ID NO: 5967 - DNA, 23 bp, Artificial Sequence
  human ApoB siRNA sequence
cccgtttaccatgaccatcgatg

SEQ ID NO: 5968 - DNA, 23 bp, Artificial Sequence
  human ApoB siRNA sequence
ccgtttaccatgaccatcgatgc

SEQ ID NO: 5969 - DNA, 23 bp, Artificial Sequence
  human ApoB siRNA sequence
cgtttaccatgaccatcgatgca

SEQ ID NO: 5970 - DNA, 23 bp, Artificial Sequence
  human ApoB siRNA sequence
gtttaccatgaccatcgatgcac

SEQ ID NO: 5971 - DNA, 23 bp, Artificial Sequence
  human ApoB siRNA sequence
tttaccatgaccatcgatgcaca

SEQ ID NO: 5972 - DNA, 23 bp, Artificial Sequence
  human ApoB siRNA sequence
ttaccatgaccatcgatgcacat

SEQ ID NO: 5973 - DNA, 23 bp, Artificial Sequence
  human ApoB siRNA sequence
taccatgaccatcgatgcacata

SEQ ID NO: 5974 - DNA, 23 bp, Artificial Sequence
  human ApoB siRNA sequence
accatgaccatcgatgcacatac

SEQ ID NO: 5975 - DNA, 23 bp, Artificial Sequence
  human ApoB siRNA sequence
ccatgaccatcgatgcacataca

SEQ ID NO: 5976 - DNA, 23 bp, Artificial Sequence
  human ApoB siRNA sequence
catgaccatcgatgcacatacaa

SEQ ID NO: 5977 - DNA, 23 bp, Artificial Sequence
  human ApoB siRNA sequence
atgaccatcgatgcacatacaaa

SEQ ID NO: 5978 - DNA, 23 bp, Artificial Sequence
  human ApoB siRNA sequence
tgaccatcgatgcacatacaaat

SEQ ID NO: 5979 - DNA, 23 bp, Artificial Sequence
  human ApoB siRNA sequence
gaccatcgatgcacatacaaatg

SEQ ID NO: 5980 - DNA, 23 bp, Artificial Sequence
  human ApoB siRNA sequence
accatcgatgcacatacaaatgg

SEQ ID NO: 5981 - DNA, 23 bp, Artificial Sequence
  human ApoB siRNA sequence
ccatcgatgcacatacaaatggc

SEQ ID NO: 5982 - DNA, 23 bp, Artificial Sequence
  human ApoB siRNA sequence
catcgatgcacatacaaatggca

SEQ ID NO: 5983 - DNA, 23 bp, Artificial Sequence
  human ApoB siRNA sequence
atcgatgcacatacaaatggcaa

SEQ ID NO: 5984 - DNA, 23 bp, Artificial Sequence
  human ApoB siRNA sequence
tcgatgcacatacaaatggcaat

SEQ ID NO: 5985 - DNA, 23 bp, Artificial Sequence
  human ApoB siRNA sequence
cgatgcacatacaaatggcaatg

SEQ ID NO: 5986 - DNA, 23 bp, Artificial Sequence
  human ApoB siRNA sequence
gatgcacatacaaatggcaatgg

SEQ ID NO: 5987 - DNA, 23 bp, Artificial Sequence
  human ApoB siRNA sequence
atgcacatacaaatggcaatggg

SEQ ID NO: 5988 - DNA, 23 bp, Artificial Sequence
  human ApoB siRNA sequence
tgcacatacaaatggcaatggga

SEQ ID NO: 5989 - DNA, 23 bp, Artificial Sequence
  human ApoB siRNA sequence
gcacatacaaatggcaatgggaa

SEQ ID NO: 5990 - DNA, 23 bp, Artificial Sequence
  human ApoB siRNA sequence
cacatacaaatggcaatgggaaa

SEQ ID NO: 5991 - DNA, 23 bp, Artificial Sequence
  human ApoB siRNA sequence
acatacaaatggcaatgggaaac

SEQ ID NO: 5992 - DNA, 23 bp, Artificial Sequence
  human ApoB siRNA sequence
catacaaatggcaatgggaaact

SEQ ID NO: 5993 - DNA, 23 bp, Artificial Sequence
  human ApoB siRNA sequence
atacaaatggcaatgggaaactc

SEQ ID NO: 5994 - DNA, 23 bp, Artificial Sequence
  human ApoB siRNA sequence
tacaaatggcaatgggaaactcg

SEQ ID NO: 5995 - DNA, 23 bp, Artificial Sequence
  human ApoB siRNA sequence
acaaatggcaatgggaaactcgc

SEQ ID NO: 5996 - DNA, 23 bp, Artificial Sequence
  human ApoB siRNA sequence
caaatggcaatgggaaactcgct

SEQ ID NO: 5997 - DNA, 23 bp, Artificial Sequence
  human ApoB siRNA sequence
aaatggcaatgggaaactcgctc

SEQ ID NO: 5998 - DNA, 23 bp, Artificial Sequence
  human ApoB siRNA sequence
aatggcaatgggaaactcgctct

SEQ ID NO: 5999 - DNA, 23 bp, Artificial Sequence
  human ApoB siRNA sequence
atggcaatgggaaactcgctctc

SEQ ID NO: 6000 - DNA, 23 bp, Artificial Sequence
  human ApoB siRNA sequence
tggcaatgggaaactcgctctct

SEQ ID NO: 6001 - DNA, 23 bp, Artificial Sequence
  human ApoB siRNA sequence
ggcaatgggaaactcgctctctg

SEQ ID NO: 6002 - DNA, 23 bp, Artificial Sequence
  human ApoB siRNA sequence
gcaatgggaaactcgctctctgg

SEQ ID NO: 6003 - DNA, 23 bp, Artificial Sequence
  human ApoB siRNA sequence
caatgggaaactcgctctctggg

SEQ ID NO: 6004 - DNA, 23 bp, Artificial Sequence
  human ApoB siRNA sequence
aatgggaaactcgctctctgggg

SEQ ID NO: 6005 - DNA, 23 bp, Artificial Sequence
  human ApoB siRNA sequence
atgggaaactcgctctctgggga

SEQ ID NO: 6006 - DNA, 23 bp, Artificial Sequence
  human ApoB siRNA sequence
tgggaaactcgctctctggggag

SEQ ID NO: 6007 - DNA, 23 bp, Artificial Sequence
  human ApoB siRNA sequence
gggaaactcgctctctggggaga

SEQ ID NO: 6008 - DNA, 23 bp, Artificial Sequence
  human ApoB siRNA sequence
ggaaactcgctctctggggagaa

SEQ ID NO: 6009 - DNA, 23 bp, Artificial Sequence
  human ApoB siRNA sequence
gaaactcgctctctggggagaac

SEQ ID NO: 6010 - DNA, 23 bp, Artificial Sequence
  human ApoB siRNA sequence
aaactcgctctctggggagaaca

SEQ ID NO: 6011 - DNA, 23 bp, Artificial Sequence
  human ApoB siRNA sequence
aactcgctctctggggagaacat

SEQ ID NO: 6012 - DNA, 23 bp, Artificial Sequence
  human ApoB siRNA sequence
actcgctctctggggagaacata

SEQ ID NO: 6013 - DNA, 23 bp, Artificial Sequence
  human ApoB siRNA sequence
ctcgctctctggggagaacatac

SEQ ID NO: 6014 - DNA, 23 bp, Artificial Sequence
  human ApoB siRNA sequence
tcgctctctggggagaacatact

SEQ ID NO: 6015 - DNA, 23 bp, Artificial Sequence
  human ApoB siRNA sequence
cgctctctggggagaacatactg

SEQ ID NO: 6016 - DNA, 23 bp, Artificial Sequence
  human ApoB siRNA sequence
gctctctggggagaacatactgg

SEQ ID NO: 6017 - DNA, 23 bp, Artificial Sequence
  human ApoB siRNA sequence
ctctctggggagaacatactggg

SEQ ID NO: 6018 - DNA, 23 bp, Artificial Sequence
  human ApoB siRNA sequence
tctctggggagaacatactgggc

SEQ ID NO: 6019 - DNA, 23 bp, Artificial Sequence
  human ApoB siRNA sequence
ctctggggagaacatactgggca

SEQ ID NO: 6020 - DNA, 23 bp, Artificial Sequence
  human ApoB siRNA sequence
tctggggagaacatactgggcag

SEQ ID NO: 6021 - DNA, 23 bp, Artificial Sequence
  human ApoB siRNA sequence
ctggggagaacatactgggcagc

SEQ ID NO: 6022 - DNA, 23 bp, Artificial Sequence
  human ApoB siRNA sequence
tggggagaacatactgggcagct

SEQ ID NO: 6023 - DNA, 23 bp, Artificial Sequence
  human ApoB siRNA sequence
ggggagaacatactgggcagctg

SEQ ID NO: 6024 - DNA, 23 bp, Artificial Sequence
  human ApoB siRNA sequence
gggagaacatactgggcagctgt

SEQ ID NO: 6025 - DNA, 23 bp, Artificial Sequence
  human ApoB siRNA sequence
ggagaacatactgggcagctgta

SEQ ID NO: 6026 - DNA, 23 bp, Artificial Sequence
  human ApoB siRNA sequence
gagaacatactgggcagctgtat

SEQ ID NO: 6027 - DNA, 23 bp, Artificial Sequence
  human ApoB siRNA sequence
agaacatactgggcagctgtata

SEQ ID NO: 6028 - DNA, 23 bp, Artificial Sequence
  human ApoB siRNA sequence
gaacatactgggcagctgtatag

SEQ ID NO: 6029 - DNA, 23 bp, Artificial Sequence
  human ApoB siRNA sequence
aacatactgggcagctgtatagc

SEQ ID NO: 6030 - DNA, 23 bp, Artificial Sequence
  human ApoB siRNA sequence
acatactgggcagctgtatagca

SEQ ID NO: 6031 - DNA, 23 bp, Artificial Sequence
  human ApoB siRNA sequence
catactgggcagctgtatagcaa

SEQ ID NO: 6032 - DNA, 23 bp, Artificial Sequence
  human ApoB siRNA sequence
atactgggcagctgtatagcaaa

SEQ ID NO: 6033 - DNA, 23 bp, Artificial Sequence
  human ApoB siRNA sequence
tactgggcagctgtatagcaaat

SEQ ID NO: 6034 - DNA, 23 bp, Artificial Sequence
  human ApoB siRNA sequence
actgggcagctgtatagcaaatt

SEQ ID NO: 6035 - DNA, 23 bp, Artificial Sequence
  human ApoB siRNA sequence
ctgggcagctgtatagcaaattc

SEQ ID NO: 6036 - DNA, 23 bp, Artificial Sequence
  human ApoB siRNA sequence
tgggcagctgtatagcaaattcc

SEQ ID NO: 6037 - DNA, 23 bp, Artificial Sequence
  human ApoB siRNA sequence
gggcagctgtatagcaaattcct

SEQ ID NO: 6038 - DNA, 23 bp, Artificial Sequence
  human ApoB siRNA sequence
ggcagctgtatagcaaattcctg

SEQ ID NO: 6039 - DNA, 23 bp, Artificial Sequence
  human ApoB siRNA sequence
gcagctgtatagcaaattcctgt

SEQ ID NO: 6040 - DNA, 23 bp, Artificial Sequence
  human ApoB siRNA sequence
cagctgtatagcaaattcctgtt

SEQ ID NO: 6041 - DNA, 23 bp, Artificial Sequence
  human ApoB siRNA sequence
agctgtatagcaaattcctgttg

SEQ ID NO: 6042 - DNA, 23 bp, Artificial Sequence
  human ApoB siRNA sequence
gctgtatagcaaattcctgttga

SEQ ID NO: 6043 - DNA, 23 bp, Artificial Sequence
  human ApoB siRNA sequence
ctgtatagcaaattcctgttgaa

SEQ ID NO: 6044 - DNA, 23 bp, Artificial Sequence
  human ApoB siRNA sequence
tgtatagcaaattcctgttgaaa

SEQ ID NO: 6045 - DNA, 23 bp, Artificial Sequence
  human ApoB siRNA sequence
gtatagcaaattcctgttgaaag

SEQ ID NO: 6046 - DNA, 23 bp, Artificial Sequence
  human ApoB siRNA sequence
tatagcaaattcctgttgaaagc

SEQ ID NO: 6047 - DNA, 23 bp, Artificial Sequence
  human ApoB siRNA sequence
atagcaaattcctgttgaaagca

SEQ ID NO: 6048 - DNA, 23 bp, Artificial Sequence
  human ApoB siRNA sequence
tagcaaattcctgttgaaagcag

SEQ ID NO: 6049 - DNA, 23 bp, Artificial Sequence
  human ApoB siRNA sequence
agcaaattcctgttgaaagcaga

SEQ ID NO: 6050 - DNA, 23 bp, Artificial Sequence
  human ApoB siRNA sequence
gcaaattcctgttgaaagcagaa

SEQ ID NO: 6051 - DNA, 23 bp, Artificial Sequence
  human ApoB siRNA sequence
caaattcctgttgaaagcagaac

SEQ ID NO: 6052 - DNA, 23 bp, Artificial Sequence
  human ApoB siRNA sequence
aaattcctgttgaaagcagaacc

SEQ ID NO: 6053 - DNA, 23 bp, Artificial Sequence
  human ApoB siRNA sequence
aattcctgttgaaagcagaacct

SEQ ID NO: 6054 - DNA, 23 bp, Artificial Sequence
  human ApoB siRNA sequence
attcctgttgaaagcagaacctc

SEQ ID NO: 6055 - DNA, 23 bp, Artificial Sequence
  human ApoB siRNA sequence
ttcctgttgaaagcagaacctct

SEQ ID NO: 6056 - DNA, 23 bp, Artificial Sequence
  human ApoB siRNA sequence
tcctgttgaaagcagaacctctg

SEQ ID NO: 6057 - DNA, 23 bp, Artificial Sequence
  human ApoB siRNA sequence
cctgttgaaagcagaacctctgg

SEQ ID NO: 6058 - DNA, 23 bp, Artificial Sequence
  human ApoB siRNA sequence
ctgttgaaagcagaacctctggc

SEQ ID NO: 6059 - DNA, 23 bp, Artificial Sequence
  human ApoB siRNA sequence
tgttgaaagcagaacctctggca

SEQ ID NO: 6060 - DNA, 23 bp, Artificial Sequence
  human ApoB siRNA sequence
gttgaaagcagaacctctggcat

SEQ ID NO: 6061 - DNA, 23 bp, Artificial Sequence
  human ApoB siRNA sequence
ttgaaagcagaacctctggcatt

SEQ ID NO: 6062 - DNA, 23 bp, Artificial Sequence
  human ApoB siRNA sequence
tgaaagcagaacctctggcattt

SEQ ID NO: 6063 - DNA, 23 bp, Artificial Sequence
  human ApoB siRNA sequence
gaaagcagaacctctggcattta

SEQ ID NO: 6064 - DNA, 23 bp, Artificial Sequence
  human ApoB siRNA sequence
aaagcagaacctctggcatttac

SEQ ID NO: 6065 - DNA, 23 bp, Artificial Sequence
  human ApoB siRNA sequence
aagcagaacctctggcatttact

SEQ ID NO: 6066 - DNA, 23 bp, Artificial Sequence
  human ApoB siRNA sequence
agcagaacctctggcatttactt

SEQ ID NO: 6067 - DNA, 23 bp, Artificial Sequence
  human ApoB siRNA sequence
gcagaacctctggcatttacttt

SEQ ID NO: 6068 - DNA, 23 bp, Artificial Sequence
  human ApoB siRNA sequence
cagaacctctggcatttactttc

SEQ ID NO: 6069 - DNA, 23 bp, Artificial Sequence
  human ApoB siRNA sequence
agaacctctggcatttactttct

SEQ ID NO: 6070 - DNA, 23 bp, Artificial Sequence
  human ApoB siRNA sequence
gaacctctggcatttactttctc

SEQ ID NO: 6071 - DNA, 23 bp, Artificial Sequence
  human ApoB siRNA sequence
aacctctggcatttactttctct

SEQ ID NO: 6072 - DNA, 23 bp, Artificial Sequence
  human ApoB siRNA sequence
acctctggcatttactttctctc

SEQ ID NO: 6073 - DNA, 23 bp, Artificial Sequence
  human ApoB siRNA sequence
cctctggcatttactttctctca

SEQ ID NO: 6074 - DNA, 23 bp, Artificial Sequence
  human ApoB siRNA sequence
ctctggcatttactttctctcat

SEQ ID NO: 6075 - DNA, 23 bp, Artificial Sequence
  human ApoB siRNA sequence
tctggcatttactttctctcatg

SEQ ID NO: 6076 - DNA, 23 bp, Artificial Sequence
  human ApoB siRNA sequence
ctggcatttactttctctcatga

SEQ ID NO: 6077 - DNA, 23 bp, Artificial Sequence
  human ApoB siRNA sequence
tggcatttactttctctcatgat

SEQ ID NO: 6078 - DNA, 23 bp, Artificial Sequence
  human ApoB siRNA sequence
ggcatttactttctctcatgatt

SEQ ID NO: 6079 - DNA, 23 bp, Artificial Sequence
  human ApoB siRNA sequence
gcatttactttctctcatgatta

SEQ ID NO: 6080 - DNA, 23 bp, Artificial Sequence
  human ApoB siRNA sequence
catttactttctctcatgattac

SEQ ID NO: 6081 - DNA, 23 bp, Artificial Sequence
  human ApoB siRNA sequence
atttactttctctcatgattaca

SEQ ID NO: 6082 - DNA, 23 bp, Artificial Sequence
  human ApoB siRNA sequence
tttactttctctcatgattacaa

SEQ ID NO: 6083 - DNA, 23 bp, Artificial Sequence
  human ApoB siRNA sequence
ttactttctctcatgattacaaa

SEQ ID NO: 6084 - DNA, 23 bp, Artificial Sequence
  human ApoB siRNA sequence
tactttctctcatgattacaaag

SEQ ID NO: 6085 - DNA, 23 bp, Artificial Sequence
  human ApoB siRNA sequence
actttctctcatgattacaaagg

SEQ ID NO: 6086 - DNA, 23 bp, Artificial Sequence
  human ApoB siRNA sequence
ctttctctcatgattacaaaggc

SEQ ID NO: 6087 - DNA, 23 bp, Artificial Sequence
  human ApoB siRNA sequence
tttctctcatgattacaaaggct

SEQ ID NO: 6088 - DNA, 23 bp, Artificial Sequence
  human ApoB siRNA sequence
ttctctcatgattacaaaggctc

SEQ ID NO: 6089 - DNA, 23 bp, Artificial Sequence
  human ApoB siRNA sequence
tctctcatgattacaaaggctcc

SEQ ID NO: 6090 - DNA, 23 bp, Artificial Sequence
  human ApoB siRNA sequence
ctctcatgattacaaaggctcca

SEQ ID NO: 6091 - DNA, 23 bp, Artificial Sequence
  human ApoB siRNA sequence
tctcatgattacaaaggctccac

SEQ ID NO: 6092 - DNA, 23 bp, Artificial Sequence
  human ApoB siRNA sequence
ctcatgattacaaaggctccaca

SEQ ID NO: 6093 - DNA, 23 bp, Artificial Sequence
  human ApoB siRNA sequence
tcatgattacaaaggctccacaa

SEQ ID NO: 6094 - DNA, 23 bp, Artificial Sequence
  human ApoB siRNA sequence
catgattacaaaggctccacaag

SEQ ID NO: 6095 - DNA, 23 bp, Artificial Sequence
  human ApoB siRNA sequence
atgattacaaaggctccacaagt

SEQ ID NO: 6096 - DNA, 23 bp, Artificial Sequence
  human ApoB siRNA sequence
tgattacaaaggctccacaagtc

SEQ ID NO: 6097 - DNA, 23 bp, Artificial Sequence
  human ApoB siRNA sequence
gattacaaaggctccacaagtca

SEQ ID NO: 6098 - DNA, 23 bp, Artificial Sequence
  human ApoB siRNA sequence
attacaaaggctccacaagtcat

SEQ ID NO: 6099 - DNA, 23 bp, Artificial Sequence
  human ApoB siRNA sequence
ttacaaaggctccacaagtcatc

SEQ ID NO: 6100 - DNA, 23 bp, Artificial Sequence
  human ApoB siRNA sequence
tacaaaggctccacaagtcatca

SEQ ID NO: 6101 - DNA, 23 bp, Artificial Sequence
  human ApoB siRNA sequence
acaaaggctccacaagtcatcat

SEQ ID NO: 6102 - DNA, 23 bp, Artificial Sequence
  human ApoB siRNA sequence
caaaggctccacaagtcatcatc

SEQ ID NO: 6103 - DNA, 23 bp, Artificial Sequence
  human ApoB siRNA sequence
aaaggctccacaagtcatcatct

SEQ ID NO: 6104 - DNA, 23 bp, Artificial Sequence
  human ApoB siRNA sequence
aaggctccacaagtcatcatctc

SEQ ID NO: 6105 - DNA, 23 bp, Artificial Sequence
  human ApoB siRNA sequence
aggctccacaagtcatcatctcg

SEQ ID NO: 6106 - DNA, 23 bp, Artificial Sequence
  human ApoB siRNA sequence
ggctccacaagtcatcatctcgt

SEQ ID NO: 6107 - DNA, 23 bp, Artificial Sequence
  human ApoB siRNA sequence
gctccacaagtcatcatctcgtg

SEQ ID NO: 6108 - DNA, 23 bp, Artificial Sequence
  human ApoB siRNA sequence
ctccacaagtcatcatctcgtgt

SEQ ID NO: 6109 - DNA, 23 bp, Artificial Sequence
  human ApoB siRNA sequence
tccacaagtcatcatctcgtgtc

SEQ ID NO: 6110 - DNA, 23 bp, Artificial Sequence
  human ApoB siRNA sequence
ccacaagtcatcatctcgtgtct

SEQ ID NO: 6111 - DNA, 23 bp, Artificial Sequence
  human ApoB siRNA sequence
cacaagtcatcatctcgtgtcta

SEQ ID NO: 6112 - DNA, 23 bp, Artificial Sequence
  human ApoB siRNA sequence
acaagtcatcatctcgtgtctag

SEQ ID NO: 6113 - DNA, 23 bp, Artificial Sequence
  human ApoB siRNA sequence
caagtcatcatctcgtgtctagg

SEQ ID NO: 6114 - DNA, 23 bp, Artificial Sequence
  human ApoB siRNA sequence
aagtcatcatctcgtgtctagga

SEQ ID NO: 6115 - DNA, 23 bp, Artificial Sequence
  human ApoB siRNA sequence
agtcatcatctcgtgtctaggaa

SEQ ID NO: 6116 - DNA, 23 bp, Artificial Sequence
  human ApoB siRNA sequence
gtcatcatctcgtgtctaggaaa

SEQ ID NO: 6117 - DNA, 23 bp, Artificial Sequence
  human ApoB siRNA sequence
tcatcatctcgtgtctaggaaaa

SEQ ID NO: 6118 - DNA, 23 bp, Artificial Sequence
  human ApoB siRNA sequence
catcatctcgtgtctaggaaaag

SEQ ID NO: 6119 - DNA, 23 bp, Artificial Sequence
  human ApoB siRNA sequence
atcatctcgtgtctaggaaaagc

SEQ ID NO: 6120 - DNA, 23 bp, Artificial Sequence
  human ApoB siRNA sequence
tcatctcgtgtctaggaaaagca

SEQ ID NO: 6121 - DNA, 23 bp, Artificial Sequence
  human ApoB siRNA sequence
catctcgtgtctaggaaaagcat

SEQ ID NO: 6122 - DNA, 23 bp, Artificial Sequence
  human ApoB siRNA sequence
atctcgtgtctaggaaaagcatc

SEQ ID NO: 6123 - DNA, 23 bp, Artificial Sequence
  human ApoB siRNA sequence
tctcgtgtctaggaaaagcatca

SEQ ID NO: 6124 - DNA, 23 bp, Artificial Sequence
  human ApoB siRNA sequence
ctcgtgtctaggaaaagcatcag

SEQ ID NO: 6125 - DNA, 23 bp, Artificial Sequence
  human ApoB siRNA sequence
tcgtgtctaggaaaagcatcagt

SEQ ID NO: 6126 - DNA, 23 bp, Artificial Sequence
  human ApoB siRNA sequence
cgtgtctaggaaaagcatcagtg

SEQ ID NO: 6127 - DNA, 23 bp, Artificial Sequence
  human ApoB siRNA sequence
gtgtctaggaaaagcatcagtgc

SEQ ID NO: 6128 - DNA, 23 bp, Artificial Sequence
  human ApoB siRNA sequence
tgtctaggaaaagcatcagtgca

SEQ ID NO: 6129 - DNA, 23 bp, Artificial Sequence
  human ApoB siRNA sequence
gtctaggaaaagcatcagtgcag

SEQ ID NO: 6130 - DNA, 23 bp, Artificial Sequence
  human ApoB siRNA sequence
tctaggaaaagcatcagtgcagc

SEQ ID NO: 6131 - DNA, 23 bp, Artificial Sequence
  human ApoB siRNA sequence
ctaggaaaagcatcagtgcagct

SEQ ID NO: 6132 - DNA, 23 bp, Artificial Sequence
  human ApoB siRNA sequence
taggaaaagcatcagtgcagctc

SEQ ID NO: 6133 - DNA, 23 bp, Artificial Sequence
  human ApoB siRNA sequence
aggaaaagcatcagtgcagctct

SEQ ID NO: 6134 - DNA, 23 bp, Artificial Sequence
  human ApoB siRNA sequence
ggaaaagcatcagtgcagctctt

SEQ ID NO: 6135 - DNA, 23 bp, Artificial Sequence
  human ApoB siRNA sequence
gaaaagcatcagtgcagctcttg

SEQ ID NO: 6136 - DNA, 23 bp, Artificial Sequence
  human ApoB siRNA sequence
aaaagcatcagtgcagctcttga

SEQ ID NO: 6137 - DNA, 23 bp, Artificial Sequence
  human ApoB siRNA sequence
aaagcatcagtgcagctcttgaa

SEQ ID NO: 6138 - DNA, 23 bp, Artificial Sequence
  human ApoB siRNA sequence
aagcatcagtgcagctcttgaac

SEQ ID NO: 6139 - DNA, 23 bp, Artificial Sequence
  human ApoB siRNA sequence
agcatcagtgcagctcttgaaca

SEQ ID NO: 6140 - DNA, 23 bp, Artificial Sequence
  human ApoB siRNA sequence
gcatcagtgcagctcttgaacac

SEQ ID NO: 6141 - DNA, 23 bp, Artificial Sequence
  human ApoB siRNA sequence
catcagtgcagctcttgaacaca

SEQ ID NO: 6142 - DNA, 23 bp, Artificial Sequence
  human ApoB siRNA sequence
atcagtgcagctcttgaacacaa

SEQ ID NO: 6143 - DNA, 23 bp, Artificial Sequence
  human ApoB siRNA sequence
tcagtgcagctcttgaacacaaa

SEQ ID NO: 6144 - DNA, 23 bp, Artificial Sequence
  human ApoB siRNA sequence
cagtgcagctcttgaacacaaag

SEQ ID NO: 6145 - DNA, 23 bp, Artificial Sequence
  human ApoB siRNA sequence
agtgcagctcttgaacacaaagt

SEQ ID NO: 6146 - DNA, 23 bp, Artificial Sequence
  human ApoB siRNA sequence
gtgcagctcttgaacacaaagtc

SEQ ID NO: 6147 - DNA, 23 bp, Artificial Sequence
  human ApoB siRNA sequence
tgcagctcttgaacacaaagtca

SEQ ID NO: 6148 - DNA, 23 bp, Artificial Sequence
  human ApoB siRNA sequence
gcagctcttgaacacaaagtcag

SEQ ID NO: 6149 - DNA, 23 bp, Artificial Sequence
  human ApoB siRNA sequence
cagctcttgaacacaaagtcagt

SEQ ID NO: 6150 - DNA, 23 bp, Artificial Sequence
  human ApoB siRNA sequence
agctcttgaacacaaagtcagtg

SEQ ID NO: 6151 - DNA, 23 bp, Artificial Sequence
  human ApoB siRNA sequence
gctcttgaacacaaagtcagtgc

SEQ ID NO: 6152 - DNA, 23 bp, Artificial Sequence
  human ApoB siRNA sequence
ctcttgaacacaaagtcagtgcc

SEQ ID NO: 6153 - DNA, 23 bp, Artificial Sequence
  human ApoB siRNA sequence
tcttgaacacaaagtcagtgccc

SEQ ID NO: 6154 - DNA, 23 bp, Artificial Sequence
  human ApoB siRNA sequence
cttgaacacaaagtcagtgccct

SEQ ID NO: 6155 - DNA, 23 bp, Artificial Sequence
  human ApoB siRNA sequence
ttgaacacaaagtcagtgccctg

SEQ ID NO: 6156 - DNA, 23 bp, Artificial Sequence
  human ApoB siRNA sequence
tgaacacaaagtcagtgccctgc

SEQ ID NO: 6157 - DNA, 23 bp, Artificial Sequence
  human ApoB siRNA sequence
gaacacaaagtcagtgccctgct

SEQ ID NO: 6158 - DNA, 23 bp, Artificial Sequence
  human ApoB siRNA sequence
aacacaaagtcagtgccctgctt

SEQ ID NO: 6159 - DNA, 23 bp, Artificial Sequence
  human ApoB siRNA sequence
acacaaagtcagtgccctgctta

SEQ ID NO: 6160 - DNA, 23 bp, Artificial Sequence
  human ApoB siRNA sequence
cacaaagtcagtgccctgcttac

SEQ ID NO: 6161 - DNA, 23 bp, Artificial Sequence
  human ApoB siRNA sequence
acaaagtcagtgccctgcttact

SEQ ID NO: 6162 - DNA, 23 bp, Artificial Sequence
  human ApoB siRNA sequence
caaagtcagtgccctgcttactc

SEQ ID NO: 6163 - DNA, 23 bp, Artificial Sequence
  human ApoB siRNA sequence
aaagtcagtgccctgcttactcc

SEQ ID NO: 6164 - DNA, 23 bp, Artificial Sequence
  human ApoB siRNA sequence
aagtcagtgccctgcttactcca

SEQ ID NO: 6165 - DNA, 23 bp, Artificial Sequence
  human ApoB siRNA sequence
agtcagtgccctgcttactccag

SEQ ID NO: 6166 - DNA, 23 bp, Artificial Sequence
  human ApoB siRNA sequence
gtcagtgccctgcttactccagc

SEQ ID NO: 6167 - DNA, 23 bp, Artificial Sequence
  human ApoB siRNA sequence
tcagtgccctgcttactccagct

SEQ ID NO: 6168 - DNA, 23 bp, Artificial Sequence
  human ApoB siRNA sequence
cagtgccctgcttactccagctg

SEQ ID NO: 6169 - DNA, 23 bp, Artificial Sequence
  human ApoB siRNA sequence
agtgccctgcttactccagctga

SEQ ID NO: 6170 - DNA, 23 bp, Artificial Sequence
  human ApoB siRNA sequence
gtgccctgcttactccagctgag

SEQ ID NO: 6171 - DNA, 23 bp, Artificial Sequence
  human ApoB siRNA sequence
tgccctgcttactccagctgagc

SEQ ID NO: 6172 - DNA, 23 bp, Artificial Sequence
  human ApoB siRNA sequence
gccctgcttactccagctgagca

SEQ ID NO: 6173 - DNA, 23 bp, Artificial Sequence
  human ApoB siRNA sequence
ccctgcttactccagctgagcag

SEQ ID NO: 6174 - DNA, 23 bp, Artificial Sequence
  human ApoB siRNA sequence
cctgcttactccagctgagcaga

SEQ ID NO: 6175 - DNA, 23 bp, Artificial Sequence
  human ApoB siRNA sequence
ctgcttactccagctgagcagac

SEQ ID NO: 6176 - DNA, 23 bp, Artificial Sequence
  human ApoB siRNA sequence
tgcttactccagctgagcagaca

SEQ ID NO: 6177 - DNA, 23 bp, Artificial Sequence
  human ApoB siRNA sequence
gcttactccagctgagcagacag

SEQ ID NO: 6178 - DNA, 23 bp, Artificial Sequence
  human ApoB siRNA sequence
cttactccagctgagcagacagg

SEQ ID NO: 6179 - DNA, 23 bp, Artificial Sequence
  human ApoB siRNA sequence
ttactccagctgagcagacaggc

SEQ ID NO: 6180 - DNA, 23 bp, Artificial Sequence
  human ApoB siRNA sequence
tactccagctgagcagacaggca

SEQ ID NO: 6181 - DNA, 23 bp, Artificial Sequence
  human ApoB siRNA sequence
actccagctgagcagacaggcac

SEQ ID NO: 6182 - DNA, 23 bp, Artificial Sequence
  human ApoB siRNA sequence
ctccagctgagcagacaggcacc

SEQ ID NO: 6183 - DNA, 23 bp, Artificial Sequence
  human ApoB siRNA sequence
tccagctgagcagacaggcacct

SEQ ID NO: 6184 - DNA, 23 bp, Artificial Sequence
  human ApoB siRNA sequence
ccagctgagcagacaggcacctg

SEQ ID NO: 6185 - DNA, 23 bp, Artificial Sequence
  human ApoB siRNA sequence
cagctgagcagacaggcacctgg

SEQ ID NO: 6186 - DNA, 23 bp, Artificial Sequence
  human ApoB siRNA sequence
agctgagcagacaggcacctgga

SEQ ID NO: 6187 - DNA, 23 bp, Artificial Sequence
  human ApoB siRNA sequence
gctgagcagacaggcacctggaa

SEQ ID NO: 6188 - DNA, 23 bp, Artificial Sequence
  human ApoB siRNA sequence
ctgagcagacaggcacctggaaa

SEQ ID NO: 6189 - DNA, 23 bp, Artificial Sequence
  human ApoB siRNA sequence
tgagcagacaggcacctggaaac

SEQ ID NO: 6190 - DNA, 23 bp, Artificial Sequence
  human ApoB siRNA sequence
gagcagacaggcacctggaaact

SEQ ID NO: 6191 - DNA, 23 bp, Artificial Sequence
  human ApoB siRNA sequence
agcagacaggcacctggaaactc

SEQ ID NO: 6192 - DNA, 23 bp, Artificial Sequence
  human ApoB siRNA sequence
gcagacaggcacctggaaactca

SEQ ID NO: 6193 - DNA, 23 bp, Artificial Sequence
  human ApoB siRNA sequence
cagacaggcacctggaaactcaa

SEQ ID NO: 6194 - DNA, 23 bp, Artificial Sequence
  human ApoB siRNA sequence
agacaggcacctggaaactcaag

SEQ ID NO: 6195 - DNA, 23 bp, Artificial Sequence
  human ApoB siRNA sequence
gacaggcacctggaaactcaaga

SEQ ID NO: 6196 - DNA, 23 bp, Artificial Sequence
  human ApoB siRNA sequence
acaggcacctggaaactcaagac

SEQ ID NO: 6197 - DNA, 23 bp, Artificial Sequence
  human ApoB siRNA sequence
caggcacctggaaactcaagacc

SEQ ID NO: 6198 - DNA, 23 bp, Artificial Sequence
  human ApoB siRNA sequence
aggcacctggaaactcaagaccc

SEQ ID NO: 6199 - DNA, 23 bp, Artificial Sequence
  human ApoB siRNA sequence
ggcacctggaaactcaagaccca

SEQ ID NO: 6200 - DNA, 23 bp, Artificial Sequence
  human ApoB siRNA sequence
gcacctggaaactcaagacccaa

SEQ ID NO: 6201 - DNA, 23 bp, Artificial Sequence
  human ApoB siRNA sequence
cacctggaaactcaagacccaat

SEQ ID NO: 6202 - DNA, 23 bp, Artificial Sequence
  human ApoB siRNA sequence
acctggaaactcaagacccaatt

SEQ ID NO: 6203 - DNA, 23 bp, Artificial Sequence
  human ApoB siRNA sequence
cctggaaactcaagacccaattt

SEQ ID NO: 6204 - DNA, 23 bp, Artificial Sequence
  human ApoB siRNA sequence
ctggaaactcaagacccaattta

SEQ ID NO: 6205 - DNA, 23 bp, Artificial Sequence
  human ApoB siRNA sequence
tggaaactcaagacccaatttaa

SEQ ID NO: 6206 - DNA, 23 bp, Artificial Sequence
  human ApoB siRNA sequence
ggaaactcaagacccaatttaac

SEQ ID NO: 6207 - DNA, 23 bp, Artificial Sequence
  human ApoB siRNA sequence
gaaactcaagacccaatttaaca

SEQ ID NO: 6208 - DNA, 23 bp, Artificial Sequence
  human ApoB siRNA sequence
aaactcaagacccaatttaacaa

SEQ ID NO: 6209 - DNA, 23 bp, Artificial Sequence
  human ApoB siRNA sequence
aactcaagacccaatttaacaac

SEQ ID NO: 6210 - DNA, 23 bp, Artificial Sequence
  human ApoB siRNA sequence
actcaagacccaatttaacaaca

SEQ ID NO: 6211 - DNA, 23 bp, Artificial Sequence
  human ApoB siRNA sequence
ctcaagacccaatttaacaacaa

SEQ ID NO: 6212 - DNA, 23 bp, Artificial Sequence
  human ApoB siRNA sequence
tcaagacccaatttaacaacaat

SEQ ID NO: 6213 - DNA, 23 bp, Artificial Sequence
  human ApoB siRNA sequence
caagacccaatttaacaacaatg

SEQ ID NO: 6214 - DNA, 23 bp, Artificial Sequence
  human ApoB siRNA sequence
aagacccaatttaacaacaatga

SEQ ID NO: 6215 - DNA, 23 bp, Artificial Sequence
  human ApoB siRNA sequence
agacccaatttaacaacaatgaa

SEQ ID NO: 6216 - DNA, 23 bp, Artificial Sequence
  human ApoB siRNA sequence
gacccaatttaacaacaatgaat

SEQ ID NO: 6217 - DNA, 23 bp, Artificial Sequence
  human ApoB siRNA sequence
acccaatttaacaacaatgaata

SEQ ID NO: 6218 - DNA, 23 bp, Artificial Sequence
  human ApoB siRNA sequence
cccaatttaacaacaatgaatac

SEQ ID NO: 6219 - DNA, 23 bp, Artificial Sequence
  human ApoB siRNA sequence
ccaatttaacaacaatgaataca

SEQ ID NO: 6220 - DNA, 23 bp, Artificial Sequence
  human ApoB siRNA sequence
caatttaacaacaatgaatacag

SEQ ID NO: 6221 - DNA, 23 bp, Artificial Sequence
  human ApoB siRNA sequence
aatttaacaacaatgaatacagc

SEQ ID NO: 6222 - DNA, 23 bp, Artificial Sequence
  human ApoB siRNA sequence
atttaacaacaatgaatacagcc

SEQ ID NO: 6223 - DNA, 23 bp, Artificial Sequence
  human ApoB siRNA sequence
tttaacaacaatgaatacagcca

SEQ ID NO: 6224 - DNA, 23 bp, Artificial Sequence
  human ApoB siRNA sequence
ttaacaacaatgaatacagccag

SEQ ID NO: 6225 - DNA, 23 bp, Artificial Sequence
  human ApoB siRNA sequence
taacaacaatgaatacagccagg

SEQ ID NO: 6226 - DNA, 23 bp, Artificial Sequence
  human ApoB siRNA sequence
aacaacaatgaatacagccagga

SEQ ID NO: 6227 - DNA, 23 bp, Artificial Sequence
  human ApoB siRNA sequence
acaacaatgaatacagccaggac

SEQ ID NO: 6228 - DNA, 23 bp, Artificial Sequence
  human ApoB siRNA sequence
caacaatgaatacagccaggact

SEQ ID NO: 6229 - DNA, 23 bp, Artificial Sequence
  human ApoB siRNA sequence
aacaatgaatacagccaggactt

SEQ ID NO: 6230 - DNA, 23 bp, Artificial Sequence
  human ApoB siRNA sequence
acaatgaatacagccaggacttg

SEQ ID NO: 6231 - DNA, 23 bp, Artificial Sequence
  human ApoB siRNA sequence
caatgaatacagccaggacttgg

SEQ ID NO: 6232 - DNA, 23 bp, Artificial Sequence
  human ApoB siRNA sequence
aatgaatacagccaggacttgga

SEQ ID NO: 6233 - DNA, 23 bp, Artificial Sequence
  human ApoB siRNA sequence
atgaatacagccaggacttggat

SEQ ID NO: 6234 - DNA, 23 bp, Artificial Sequence
  human ApoB siRNA sequence
tgaatacagccaggacttggatg

SEQ ID NO: 6235 - DNA, 23 bp, Artificial Sequence
  human ApoB siRNA sequence
gaatacagccaggacttggatgc

SEQ ID NO: 6236 - DNA, 23 bp, Artificial Sequence
  human ApoB siRNA sequence
aatacagccaggacttggatgct

SEQ ID NO: 6237 - DNA, 23 bp, Artificial Sequence
  human ApoB siRNA sequence
atacagccaggacttggatgctt

SEQ ID NO: 6238 - DNA, 23 bp, Artificial Sequence
  human ApoB siRNA sequence
tacagccaggacttggatgctta

SEQ ID NO: 6239 - DNA, 23 bp, Artificial Sequence
  human ApoB siRNA sequence
acagccaggacttggatgcttac

SEQ ID NO: 6240 - DNA, 23 bp, Artificial Sequence
  human ApoB siRNA sequence
cagccaggacttggatgcttaca

SEQ ID NO: 6241 - DNA, 23 bp, Artificial Sequence
  human ApoB siRNA sequence
agccaggacttggatgcttacaa

SEQ ID NO: 6242 - DNA, 23 bp, Artificial Sequence
  human ApoB siRNA sequence
gccaggacttggatgcttacaac

SEQ ID NO: 6243 - DNA, 23 bp, Artificial Sequence
  human ApoB siRNA sequence
ccaggacttggatgcttacaaca

SEQ ID NO: 6244 - DNA, 23 bp, Artificial Sequence
  human ApoB siRNA sequence
caggacttggatgcttacaacac

SEQ ID NO: 6245 - DNA, 23 bp, Artificial Sequence
  human ApoB siRNA sequence
aggacttggatgcttacaacact

SEQ ID NO: 6246 - DNA, 23 bp, Artificial Sequence
  human ApoB siRNA sequence
ggacttggatgcttacaacacta

SEQ ID NO: 6247 - DNA, 23 bp, Artificial Sequence
  human ApoB siRNA sequence
gacttggatgcttacaacactaa

SEQ ID NO: 6248 - DNA, 23 bp, Artificial Sequence
  human ApoB siRNA sequence
acttggatgcttacaacactaaa

SEQ ID NO: 6249 - DNA, 23 bp, Artificial Sequence
  human ApoB siRNA sequence
cttggatgcttacaacactaaag

SEQ ID NO: 6250 - DNA, 23 bp, Artificial Sequence
  human ApoB siRNA sequence
ttggatgcttacaacactaaaga

SEQ ID NO: 6251 - DNA, 23 bp, Artificial Sequence
  human ApoB siRNA sequence
tggatgcttacaacactaaagat

SEQ ID NO: 6252 - DNA, 23 bp, Artificial Sequence
  human ApoB siRNA sequence
ggatgcttacaacactaaagata

SEQ ID NO: 6253 - DNA, 23 bp, Artificial Sequence
  human ApoB siRNA sequence
gatgcttacaacactaaagataa

SEQ ID NO: 6254 - DNA, 23 bp, Artificial Sequence
  human ApoB siRNA sequence
atgcttacaacactaaagataaa

SEQ ID NO: 6255 - DNA, 23 bp, Artificial Sequence
  human ApoB siRNA sequence
tgcttacaacactaaagataaaa

SEQ ID NO: 6256 - DNA, 23 bp, Artificial Sequence
  human ApoB siRNA sequence
gcttacaacactaaagataaaat

SEQ ID NO: 6257 - DNA, 23 bp, Artificial Sequence
  human ApoB siRNA sequence
cttacaacactaaagataaaatt

SEQ ID NO: 6258 - DNA, 23 bp, Artificial Sequence
  human ApoB siRNA sequence
ttacaacactaaagataaaattg

SEQ ID NO: 6259 - DNA, 23 bp, Artificial Sequence
  human ApoB siRNA sequence
tacaacactaaagataaaattgg

SEQ ID NO: 6260 - DNA, 23 bp, Artificial Sequence
  human ApoB siRNA sequence
acaacactaaagataaaattggc

SEQ ID NO: 6261 - DNA, 23 bp, Artificial Sequence
  human ApoB siRNA sequence
caacactaaagataaaattggcg

SEQ ID NO: 6262 - DNA, 23 bp, Artificial Sequence
  human ApoB siRNA sequence
aacactaaagataaaattggcgt

SEQ ID NO: 6263 - DNA, 23 bp, Artificial Sequence
  human ApoB siRNA sequence
acactaaagataaaattggcgtg

SEQ ID NO: 6264 - DNA, 23 bp, Artificial Sequence
  human ApoB siRNA sequence
cactaaagataaaattggcgtgg

SEQ ID NO: 6265 - DNA, 23 bp, Artificial Sequence
  human ApoB siRNA sequence
actaaagataaaattggcgtgga

SEQ ID NO: 6266 - DNA, 23 bp, Artificial Sequence
  human ApoB siRNA sequence
ctaaagataaaattggcgtggag

SEQ ID NO: 6267 - DNA, 23 bp, Artificial Sequence
  human ApoB siRNA sequence
taaagataaaattggcgtggagc

SEQ ID NO: 6268 - DNA, 23 bp, Artificial Sequence
  human ApoB siRNA sequence
aaagataaaattggcgtggagct

SEQ ID NO: 6269 - DNA, 23 bp, Artificial Sequence
  human ApoB siRNA sequence
aagataaaattggcgtggagctt

SEQ ID NO: 6270 - DNA, 23 bp, Artificial Sequence
  human ApoB siRNA sequence
agataaaattggcgtggagctta

SEQ ID NO: 6271 - DNA, 23 bp, Artificial Sequence
  human ApoB siRNA sequence
gataaaattggcgtggagcttac

SEQ ID NO: 6272 - DNA, 23 bp, Artificial Sequence
  human ApoB siRNA sequence
ataaaattggcgtggagcttact

SEQ ID NO: 6273 - DNA, 23 bp, Artificial Sequence
  human ApoB siRNA sequence
taaaattggcgtggagcttactg

SEQ ID NO: 6274 - DNA, 23 bp, Artificial Sequence
  human ApoB siRNA sequence
aaaattggcgtggagcttactgg

SEQ ID NO: 6275 - DNA, 23 bp, Artificial Sequence
  human ApoB siRNA sequence
aaattggcgtggagcttactgga

SEQ ID NO: 6276 - DNA, 23 bp, Artificial Sequence
  human ApoB siRNA sequence
aattggcgtggagcttactggac

SEQ ID NO: 6277 - DNA, 23 bp, Artificial Sequence
  human ApoB siRNA sequence
attggcgtggagcttactggacg

SEQ ID NO: 6278 - DNA, 23 bp, Artificial Sequence
  human ApoB siRNA sequence
ttggcgtggagcttactggacga

SEQ ID NO: 6279 - DNA, 23 bp, Artificial Sequence
  human ApoB siRNA sequence
tggcgtggagcttactggacgaa

SEQ ID NO: 6280 - DNA, 23 bp, Artificial Sequence
  human ApoB siRNA sequence
ggcgtggagcttactggacgaac

SEQ ID NO: 6281 - DNA, 23 bp, Artificial Sequence
  human ApoB siRNA sequence
gcgtggagcttactggacgaact

SEQ ID NO: 6282 - DNA, 23 bp, Artificial Sequence
  human ApoB siRNA sequence
cgtggagcttactggacgaactc

SEQ ID NO: 6283 - DNA, 23 bp, Artificial Sequence
  human ApoB siRNA sequence
gtggagcttactggacgaactct

SEQ ID NO: 6284 - DNA, 23 bp, Artificial Sequence
  human ApoB siRNA sequence
tggagcttactggacgaactctg

SEQ ID NO: 6285 - DNA, 23 bp, Artificial Sequence
  human ApoB siRNA sequence
ggagcttactggacgaactctgg

SEQ ID NO: 6286 - DNA, 23 bp, Artificial Sequence
  human ApoB siRNA sequence
gagcttactggacgaactctggc

SEQ ID NO: 6287 - DNA, 23 bp, Artificial Sequence
  human ApoB siRNA sequence
agcttactggacgaactctggct

SEQ ID NO: 6288 - DNA, 23 bp, Artificial Sequence
  human ApoB siRNA sequence
gcttactggacgaactctggctg

SEQ ID NO: 6289 - DNA, 23 bp, Artificial Sequence
  human ApoB siRNA sequence
cttactggacgaactctggctga

SEQ ID NO: 6290 - DNA, 23 bp, Artificial Sequence
  human ApoB siRNA sequence
ttactggacgaactctggctgac

SEQ ID NO: 6291 - DNA, 23 bp, Artificial Sequence
  human ApoB siRNA sequence
tactggacgaactctggctgacc

SEQ ID NO: 6292 - DNA, 23 bp, Artificial Sequence
  human ApoB siRNA sequence
actggacgaactctggctgacct

SEQ ID NO: 6293 - DNA, 23 bp, Artificial Sequence
  human ApoB siRNA sequence
ctggacgaactctggctgaccta

SEQ ID NO: 6294 - DNA, 23 bp, Artificial Sequence
  human ApoB siRNA sequence
tggacgaactctggctgacctaa

SEQ ID NO: 6295 - DNA, 23 bp, Artificial Sequence
  human ApoB siRNA sequence
ggacgaactctggctgacctaac

SEQ ID NO: 6296 - DNA, 23 bp, Artificial Sequence
  human ApoB siRNA sequence
gacgaactctggctgacctaact

SEQ ID NO: 6297 - DNA, 23 bp, Artificial Sequence
  human ApoB siRNA sequence
acgaactctggctgacctaactc

SEQ ID NO: 6298 - DNA, 23 bp, Artificial Sequence
  human ApoB siRNA sequence
cgaactctggctgacctaactct

SEQ ID NO: 6299 - DNA, 23 bp, Artificial Sequence
  human ApoB siRNA sequence
gaactctggctgacctaactcta

SEQ ID NO: 6300 - DNA, 23 bp, Artificial Sequence
  human ApoB siRNA sequence
aactctggctgacctaactctac

SEQ ID NO: 6301 - DNA, 23 bp, Artificial Sequence
  human ApoB siRNA sequence
actctggctgacctaactctact

SEQ ID NO: 6302 - DNA, 23 bp, Artificial Sequence
  human ApoB siRNA sequence
ctctggctgacctaactctacta

SEQ ID NO: 6303 - DNA, 23 bp, Artificial Sequence
  human ApoB siRNA sequence
tctggctgacctaactctactag

SEQ ID NO: 6304 - DNA, 23 bp, Artificial Sequence
  human ApoB siRNA sequence
ctggctgacctaactctactaga

SEQ ID NO: 6305 - DNA, 23 bp, Artificial Sequence
  human ApoB siRNA sequence
tggctgacctaactctactagac

SEQ ID NO: 6306 - DNA, 23 bp, Artificial Sequence
  human ApoB siRNA sequence
ggctgacctaactctactagact

SEQ ID NO: 6307 - DNA, 23 bp, Artificial Sequence
  human ApoB siRNA sequence
gctgacctaactctactagactc

SEQ ID NO: 6308 - DNA, 23 bp, Artificial Sequence
  human ApoB siRNA sequence
ctgacctaactctactagactcc

SEQ ID NO: 6309 - DNA, 23 bp, Artificial Sequence
  human ApoB siRNA sequence
tgacctaactctactagactccc

SEQ ID NO: 6310 - DNA, 23 bp, Artificial Sequence
  human ApoB siRNA sequence
gacctaactctactagactcccc

SEQ ID NO: 6311 - DNA, 23 bp, Artificial Sequence
  human ApoB siRNA sequence
acctaactctactagactcccca

SEQ ID NO: 6312 - DNA, 23 bp, Artificial Sequence
  human ApoB siRNA sequence
cctaactctactagactccccaa

SEQ ID NO: 6313 - DNA, 23 bp, Artificial Sequence
  human ApoB siRNA sequence
ctaactctactagactccccaat

SEQ ID NO: 6314 - DNA, 23 bp, Artificial Sequence
  human ApoB siRNA sequence
taactctactagactccccaatt

SEQ ID NO: 6315 - DNA, 23 bp, Artificial Sequence
  human ApoB siRNA sequence
aactctactagactccccaatta

SEQ ID NO: 6316 - DNA, 23 bp, Artificial Sequence
  human ApoB siRNA sequence
actctactagactccccaattaa

SEQ ID NO: 6317 - DNA, 23 bp, Artificial Sequence
  human ApoB siRNA sequence
ctctactagactccccaattaaa

SEQ ID NO: 6318 - DNA, 23 bp, Artificial Sequence
  human ApoB siRNA sequence
tctactagactccccaattaaag

SEQ ID NO: 6319 - DNA, 23 bp, Artificial Sequence
  human ApoB siRNA sequence
ctactagactccccaattaaagt

SEQ ID NO: 6320 - DNA, 23 bp, Artificial Sequence
  human ApoB siRNA sequence
tactagactccccaattaaagtg

SEQ ID NO: 6321 - DNA, 23 bp, Artificial Sequence
  human ApoB siRNA sequence
actagactccccaattaaagtgc

SEQ ID NO: 6322 - DNA, 23 bp, Artificial Sequence
  human ApoB siRNA sequence
ctagactccccaattaaagtgcc

SEQ ID NO: 6323 - DNA, 23 bp, Artificial Sequence
  human ApoB siRNA sequence
tagactccccaattaaagtgcca

SEQ ID NO: 6324 - DNA, 23 bp, Artificial Sequence
  human ApoB siRNA sequence
agactccccaattaaagtgccac

SEQ ID NO: 6325 - DNA, 23 bp, Artificial Sequence
  human ApoB siRNA sequence
gactccccaattaaagtgccact

SEQ ID NO: 6326 - DNA, 23 bp, Artificial Sequence
  human ApoB siRNA sequence
actccccaattaaagtgccactt

SEQ ID NO: 6327 - DNA, 23 bp, Artificial Sequence
  human ApoB siRNA sequence
ctccccaattaaagtgccacttt

SEQ ID NO: 6328 - DNA, 23 bp, Artificial Sequence
  human ApoB siRNA sequence
tccccaattaaagtgccactttt

SEQ ID NO: 6329 - DNA, 23 bp, Artificial Sequence
  human ApoB siRNA sequence
ccccaattaaagtgccactttta

SEQ ID NO: 6330 - DNA, 23 bp, Artificial Sequence
  human ApoB siRNA sequence
cccaattaaagtgccacttttac

SEQ ID NO: 6331 - DNA, 23 bp, Artificial Sequence
  human ApoB siRNA sequence
ccaattaaagtgccacttttact

SEQ ID NO: 6332 - DNA, 23 bp, Artificial Sequence
  human ApoB siRNA sequence
caattaaagtgccacttttactc

SEQ ID NO: 6333 - DNA, 23 bp, Artificial Sequence
  human ApoB siRNA sequence
aattaaagtgccacttttactca

SEQ ID NO: 6334 - DNA, 23 bp, Artificial Sequence
  human ApoB siRNA sequence
attaaagtgccacttttactcag

SEQ ID NO: 6335 - DNA, 23 bp, Artificial Sequence
  human ApoB siRNA sequence
ttaaagtgccacttttactcagt

SEQ ID NO: 6336 - DNA, 23 bp, Artificial Sequence
  human ApoB siRNA sequence
taaagtgccacttttactcagtg

SEQ ID NO: 6337 - DNA, 23 bp, Artificial Sequence
  human ApoB siRNA sequence
aaagtgccacttttactcagtga

SEQ ID NO: 6338 - DNA, 23 bp, Artificial Sequence
  human ApoB siRNA sequence
aagtgccacttttactcagtgag

SEQ ID NO: 6339 - DNA, 23 bp, Artificial Sequence
  human ApoB siRNA sequence
agtgccacttttactcagtgagc

SEQ ID NO: 6340 - DNA, 23 bp, Artificial Sequence
  human ApoB siRNA sequence
gtgccacttttactcagtgagcc

SEQ ID NO: 6341 - DNA, 23 bp, Artificial Sequence
  human ApoB siRNA sequence
tgccacttttactcagtgagccc

SEQ ID NO: 6342 - DNA, 23 bp, Artificial Sequence
  human ApoB siRNA sequence
gccacttttactcagtgagccca

SEQ ID NO: 6343 - DNA, 23 bp, Artificial Sequence
  human ApoB siRNA sequence
ccacttttactcagtgagcccat

SEQ ID NO: 6344 - DNA, 23 bp, Artificial Sequence
  human ApoB siRNA sequence
cacttttactcagtgagcccatc

SEQ ID NO: 6345 - DNA, 23 bp, Artificial Sequence
  human ApoB siRNA sequence
acttttactcagtgagcccatca

SEQ ID NO: 6346 - DNA, 23 bp, Artificial Sequence
  human ApoB siRNA sequence
cttttactcagtgagcccatcaa

SEQ ID NO: 6347 - DNA, 23 bp, Artificial Sequence
  human ApoB siRNA sequence
ttttactcagtgagcccatcaat

SEQ ID NO: 6348 - DNA, 23 bp, Artificial Sequence
  human ApoB siRNA sequence
tttactcagtgagcccatcaata

SEQ ID NO: 6349 - DNA, 23 bp, Artificial Sequence
  human ApoB siRNA sequence
ttactcagtgagcccatcaatat

SEQ ID NO: 6350 - DNA, 23 bp, Artificial Sequence
  human ApoB siRNA sequence
tactcagtgagcccatcaatatc

SEQ ID NO: 6351 - DNA, 23 bp, Artificial Sequence
  human ApoB siRNA sequence
actcagtgagcccatcaatatca

SEQ ID NO: 6352 - DNA, 23 bp, Artificial Sequence
  human ApoB siRNA sequence
ctcagtgagcccatcaatatcat

SEQ ID NO: 6353 - DNA, 23 bp, Artificial Sequence
  human ApoB siRNA sequence
tcagtgagcccatcaatatcatt

SEQ ID NO: 6354 - DNA, 23 bp, Artificial Sequence
  human ApoB siRNA sequence
cagtgagcccatcaatatcattg

SEQ ID NO: 6355 - DNA, 23 bp, Artificial Sequence
  human ApoB siRNA sequence
agtgagcccatcaatatcattga

SEQ ID NO: 6356 - DNA, 23 bp, Artificial Sequence
  human ApoB siRNA sequence
gtgagcccatcaatatcattgat

SEQ ID NO: 6357 - DNA, 23 bp, Artificial Sequence
  human ApoB siRNA sequence
tgagcccatcaatatcattgatg

SEQ ID NO: 6358 - DNA, 23 bp, Artificial Sequence
  human ApoB siRNA sequence
gagcccatcaatatcattgatgc

SEQ ID NO: 6359 - DNA, 23 bp, Artificial Sequence
  human ApoB siRNA sequence
agcccatcaatatcattgatgct

SEQ ID NO: 6360 - DNA, 23 bp, Artificial Sequence
  human ApoB siRNA sequence
gcccatcaatatcattgatgctt

SEQ ID NO: 6361 - DNA, 23 bp, Artificial Sequence
  human ApoB siRNA sequence
cccatcaatatcattgatgcttt

SEQ ID NO: 6362 - DNA, 23 bp, Artificial Sequence
  human ApoB siRNA sequence
ccatcaatatcattgatgcttta

SEQ ID NO: 6363 - DNA, 23 bp, Artificial Sequence
  human ApoB siRNA sequence
catcaatatcattgatgctttag

SEQ ID NO: 6364 - DNA, 23 bp, Artificial Sequence
  human ApoB siRNA sequence
atcaatatcattgatgctttaga

SEQ ID NO: 6365 - DNA, 23 bp, Artificial Sequence
  human ApoB siRNA sequence
tcaatatcattgatgctttagag

SEQ ID NO: 6366 - DNA, 23 bp, Artificial Sequence
  human ApoB siRNA sequence
caatatcattgatgctttagaga

SEQ ID NO: 6367 - DNA, 23 bp, Artificial Sequence
  human ApoB siRNA sequence
aatatcattgatgctttagagat

SEQ ID NO: 6368 - DNA, 23 bp, Artificial Sequence
  human ApoB siRNA sequence
atatcattgatgctttagagatg

SEQ ID NO: 6369 - DNA, 23 bp, Artificial Sequence
  human ApoB siRNA sequence
tatcattgatgctttagagatga

SEQ ID NO: 6370 - DNA, 23 bp, Artificial Sequence
  human ApoB siRNA sequence
atcattgatgctttagagatgag

SEQ ID NO: 6371 - DNA, 23 bp, Artificial Sequence
  human ApoB siRNA sequence
tcattgatgctttagagatgaga

SEQ ID NO: 6372 - DNA, 23 bp, Artificial Sequence
  human ApoB siRNA sequence
cattgatgctttagagatgagag

SEQ ID NO: 6373 - DNA, 23 bp, Artificial Sequence
  human ApoB siRNA sequence
attgatgctttagagatgagaga

SEQ ID NO: 6374 - DNA, 23 bp, Artificial Sequence
  human ApoB siRNA sequence
ttgatgctttagagatgagagat

SEQ ID NO: 6375 - DNA, 23 bp, Artificial Sequence
  human ApoB siRNA sequence
tgatgctttagagatgagagatg

SEQ ID NO: 6376 - DNA, 23 bp, Artificial Sequence
  human ApoB siRNA sequence
gatgctttagagatgagagatgc

SEQ ID NO: 6377 - DNA, 23 bp, Artificial Sequence
  human ApoB siRNA sequence
atgctttagagatgagagatgcc

SEQ ID NO: 6378 - DNA, 23 bp, Artificial Sequence
  human ApoB siRNA sequence
tgctttagagatgagagatgccg

SEQ ID NO: 6379 - DNA, 23 bp, Artificial Sequence
  human ApoB siRNA sequence
gctttagagatgagagatgccgt

SEQ ID NO: 6380 - DNA, 23 bp, Artificial Sequence
  human ApoB siRNA sequence
ctttagagatgagagatgccgtt

SEQ ID NO: 6381 - DNA, 23 bp, Artificial Sequence
  human ApoB siRNA sequence
tttagagatgagagatgccgttg

SEQ ID NO: 6382 - DNA, 23 bp, Artificial Sequence
  human ApoB siRNA sequence
ttagagatgagagatgccgttga

SEQ ID NO: 6383 - DNA, 23 bp, Artificial Sequence
  human ApoB siRNA sequence
tagagatgagagatgccgttgag

SEQ ID NO: 6384 - DNA, 23 bp, Artificial Sequence
  human ApoB siRNA sequence
agagatgagagatgccgttgaga

SEQ ID NO: 6385 - DNA, 23 bp, Artificial Sequence
  human ApoB siRNA sequence
gagatgagagatgccgttgagaa

SEQ ID NO: 6386 - DNA, 23 bp, Artificial Sequence
  human ApoB siRNA sequence
agatgagagatgccgttgagaag

SEQ ID NO: 6387 - DNA, 23 bp, Artificial Sequence
  human ApoB siRNA sequence
gatgagagatgccgttgagaagc

SEQ ID NO: 6388 - DNA, 23 bp, Artificial Sequence
  human ApoB siRNA sequence
atgagagatgccgttgagaagcc

SEQ ID NO: 6389 - DNA, 23 bp, Artificial Sequence
  human ApoB siRNA sequence
tgagagatgccgttgagaagccc

SEQ ID NO: 6390 - DNA, 23 bp, Artificial Sequence
  human ApoB siRNA sequence
gagagatgccgttgagaagcccc

SEQ ID NO: 6391 - DNA, 23 bp, Artificial Sequence
  human ApoB siRNA sequence
agagatgccgttgagaagcccca

SEQ ID NO: 6392 - DNA, 23 bp, Artificial Sequence
  human ApoB siRNA sequence
gagatgccgttgagaagccccaa

SEQ ID NO: 6393 - DNA, 23 bp, Artificial Sequence
  human ApoB siRNA sequence
agatgccgttgagaagccccaag

SEQ ID NO: 6394 - DNA, 23 bp, Artificial Sequence
  human ApoB siRNA sequence
gatgccgttgagaagccccaaga

SEQ ID NO: 6395 - DNA, 23 bp, Artificial Sequence
  human ApoB siRNA sequence
atgccgttgagaagccccaagaa

SEQ ID NO: 6396 - DNA, 23 bp, Artificial Sequence
  human ApoB siRNA sequence
tgccgttgagaagccccaagaat

SEQ ID NO: 6397 - DNA, 23 bp, Artificial Sequence
  human ApoB siRNA sequence
gccgttgagaagccccaagaatt

SEQ ID NO: 6398 - DNA, 23 bp, Artificial Sequence
  human ApoB siRNA sequence
ccgttgagaagccccaagaattt

SEQ ID NO: 6399 - DNA, 23 bp, Artificial Sequence
  human ApoB siRNA sequence
cgttgagaagccccaagaattta

SEQ ID NO: 6400 - DNA, 23 bp, Artificial Sequence
  human ApoB siRNA sequence
gttgagaagccccaagaatttac

SEQ ID NO: 6401 - DNA, 23 bp, Artificial Sequence
  human ApoB siRNA sequence
ttgagaagccccaagaatttaca

SEQ ID NO: 6402 - DNA, 23 bp, Artificial Sequence
  human ApoB siRNA sequence
tgagaagccccaagaatttacaa

SEQ ID NO: 6403 - DNA, 23 bp, Artificial Sequence
  human ApoB siRNA sequence
gagaagccccaagaatttacaat

SEQ ID NO: 6404 - DNA, 23 bp, Artificial Sequence
  human ApoB siRNA sequence
agaagccccaagaatttacaatt

SEQ ID NO: 6405 - DNA, 23 bp, Artificial Sequence
  human ApoB siRNA sequence
gaagccccaagaatttacaattg

SEQ ID NO: 6406 - DNA, 23 bp, Artificial Sequence
  human ApoB siRNA sequence
aagccccaagaatttacaattgt

SEQ ID NO: 6407 - DNA, 23 bp, Artificial Sequence
  human ApoB siRNA sequence
agccccaagaatttacaattgtt

SEQ ID NO: 6408 - DNA, 23 bp, Artificial Sequence
  human ApoB siRNA sequence
gccccaagaatttacaattgttg

SEQ ID NO: 6409 - DNA, 23 bp, Artificial Sequence
  human ApoB siRNA sequence
ccccaagaatttacaattgttgc

SEQ ID NO: 6410 - DNA, 23 bp, Artificial Sequence
  human ApoB siRNA sequence
cccaagaatttacaattgttgct

SEQ ID NO: 6411 - DNA, 23 bp, Artificial Sequence
  human ApoB siRNA sequence
ccaagaatttacaattgttgctt

SEQ ID NO: 6412 - DNA, 23 bp, Artificial Sequence
  human ApoB siRNA sequence
caagaatttacaattgttgcttt

SEQ ID NO: 6413 - DNA, 23 bp, Artificial Sequence
  human ApoB siRNA sequence
aagaatttacaattgttgctttt

SEQ ID NO: 6414 - DNA, 23 bp, Artificial Sequence
  human ApoB siRNA sequence
agaatttacaattgttgcttttg

SEQ ID NO: 6415 - DNA, 23 bp, Artificial Sequence
  human ApoB siRNA sequence
gaatttacaattgttgcttttgt

SEQ ID NO: 6416 - DNA, 23 bp, Artificial Sequence
  human ApoB siRNA sequence
aatttacaattgttgcttttgta

SEQ ID NO: 6417 - DNA, 23 bp, Artificial Sequence
  human ApoB siRNA sequence
atttacaattgttgcttttgtaa

SEQ ID NO: 6418 - DNA, 23 bp, Artificial Sequence
  human ApoB siRNA sequence
tttacaattgttgcttttgtaaa

SEQ ID NO: 6419 - DNA, 23 bp, Artificial Sequence
  human ApoB siRNA sequence
ttacaattgttgcttttgtaaag

SEQ ID NO: 6420 - DNA, 23 bp, Artificial Sequence
  human ApoB siRNA sequence
tacaattgttgcttttgtaaagt

SEQ ID NO: 6421 - DNA, 23 bp, Artificial Sequence
  human ApoB siRNA sequence
acaattgttgcttttgtaaagta

SEQ ID NO: 6422 - DNA, 23 bp, Artificial Sequence
  human ApoB siRNA sequence
caattgttgcttttgtaaagtat

SEQ ID NO: 6423 - DNA, 23 bp, Artificial Sequence
  human ApoB siRNA sequence
aattgttgcttttgtaaagtatg

SEQ ID NO: 6424 - DNA, 23 bp, Artificial Sequence
  human ApoB siRNA sequence
attgttgcttttgtaaagtatga

SEQ ID NO: 6425 - DNA, 23 bp, Artificial Sequence
  human ApoB siRNA sequence
ttgttgcttttgtaaagtatgat

SEQ ID NO: 6426 - DNA, 23 bp, Artificial Sequence
  human ApoB siRNA sequence
tgttgcttttgtaaagtatgata

SEQ ID NO: 6427 - DNA, 23 bp, Artificial Sequence
  human ApoB siRNA sequence
gttgcttttgtaaagtatgataa

SEQ ID NO: 6428 - DNA, 23 bp, Artificial Sequence
  human ApoB siRNA sequence
ttgcttttgtaaagtatgataaa

SEQ ID NO: 6429 - DNA, 23 bp, Artificial Sequence
  human ApoB siRNA sequence
tgcttttgtaaagtatgataaaa

SEQ ID NO: 6430 - DNA, 23 bp, Artificial Sequence
  human ApoB siRNA sequence
gcttttgtaaagtatgataaaaa

SEQ ID NO: 6431 - DNA, 23 bp, Artificial Sequence
  human ApoB siRNA sequence
cttttgtaaagtatgataaaaac

SEQ ID NO: 6432 - DNA, 23 bp, Artificial Sequence
  human ApoB siRNA sequence
ttttgtaaagtatgataaaaacc

SEQ ID NO: 6433 - DNA, 23 bp, Artificial Sequence
  human ApoB siRNA sequence
tttgtaaagtatgataaaaacca

SEQ ID NO: 6434 - DNA, 23 bp, Artificial Sequence
  human ApoB siRNA sequence
ttgtaaagtatgataaaaaccaa

SEQ ID NO: 6435 - DNA, 23 bp, Artificial Sequence
  human ApoB siRNA sequence
tgtaaagtatgataaaaaccaag

SEQ ID NO: 6436 - DNA, 23 bp, Artificial Sequence
  human ApoB siRNA sequence
gtaaagtatgataaaaaccaaga

SEQ ID NO: 6437 - DNA, 23 bp, Artificial Sequence
  human ApoB siRNA sequence
taaagtatgataaaaaccaagat

SEQ ID NO: 6438 - DNA, 23 bp, Artificial Sequence
  human ApoB siRNA sequence
aaagtatgataaaaaccaagatg

SEQ ID NO: 6439 - DNA, 23 bp, Artificial Sequence
  human ApoB siRNA sequence
aagtatgataaaaaccaagatgt

SEQ ID NO: 6440 - DNA, 23 bp, Artificial Sequence
  human ApoB siRNA sequence
agtatgataaaaaccaagatgtt

SEQ ID NO: 6441 - DNA, 23 bp, Artificial Sequence
  human ApoB siRNA sequence
gtatgataaaaaccaagatgttc

SEQ ID NO: 6442 - DNA, 23 bp, Artificial Sequence
  human ApoB siRNA sequence
tatgataaaaaccaagatgttca

SEQ ID NO: 6443 - DNA, 23 bp, Artificial Sequence
  human ApoB siRNA sequence
atgataaaaaccaagatgttcac

SEQ ID NO: 6444 - DNA, 23 bp, Artificial Sequence
  human ApoB siRNA sequence
tgataaaaaccaagatgttcact

SEQ ID NO: 6445 - DNA, 23 bp, Artificial Sequence
  human ApoB siRNA sequence
gataaaaaccaagatgttcactc

SEQ ID NO: 6446 - DNA, 23 bp, Artificial Sequence
  human ApoB siRNA sequence
ataaaaaccaagatgttcactcc

SEQ ID NO: 6447 - DNA, 23 bp, Artificial Sequence
  human ApoB siRNA sequence
taaaaaccaagatgttcactcca

SEQ ID NO: 6448 - DNA, 23 bp, Artificial Sequence
  human ApoB siRNA sequence
aaaaaccaagatgttcactccat

SEQ ID NO: 6449 - DNA, 23 bp, Artificial Sequence
  human ApoB siRNA sequence
aaaaccaagatgttcactccatt

SEQ ID NO: 6450 - DNA, 23 bp, Artificial Sequence
  human ApoB siRNA sequence
aaaccaagatgttcactccatta

SEQ ID NO: 6451 - DNA, 23 bp, Artificial Sequence
  human ApoB siRNA sequence
aaccaagatgttcactccattaa

SEQ ID NO: 6452 - DNA, 23 bp, Artificial Sequence
  human ApoB siRNA sequence
accaagatgttcactccattaac

SEQ ID NO: 6453 - DNA, 23 bp, Artificial Sequence
  human ApoB siRNA sequence
ccaagatgttcactccattaacc

SEQ ID NO: 6454 - DNA, 23 bp, Artificial Sequence
  human ApoB siRNA sequence
caagatgttcactccattaacct

SEQ ID NO: 6455 - DNA, 23 bp, Artificial Sequence
  human ApoB siRNA sequence
aagatgttcactccattaacctc

SEQ ID NO: 6456 - DNA, 23 bp, Artificial Sequence
  human ApoB siRNA sequence
agatgttcactccattaacctcc

SEQ ID NO: 6457 - DNA, 23 bp, Artificial Sequence
  human ApoB siRNA sequence
gatgttcactccattaacctccc

SEQ ID NO: 6458 - DNA, 23 bp, Artificial Sequence
  human ApoB siRNA sequence
atgttcactccattaacctccca

SEQ ID NO: 6459 - DNA, 23 bp, Artificial Sequence
  human ApoB siRNA sequence
tgttcactccattaacctcccat

SEQ ID NO: 6460 - DNA, 23 bp, Artificial Sequence
  human ApoB siRNA sequence
gttcactccattaacctcccatt

SEQ ID NO: 6461 - DNA, 23 bp, Artificial Sequence
  human ApoB siRNA sequence
ttcactccattaacctcccattt

SEQ ID NO: 6462 - DNA, 23 bp, Artificial Sequence
  human ApoB siRNA sequence
tcactccattaacctcccatttt

SEQ ID NO: 6463 - DNA, 23 bp, Artificial Sequence
  human ApoB siRNA sequence
cactccattaacctcccattttt

SEQ ID NO: 6464 - DNA, 23 bp, Artificial Sequence
  human ApoB siRNA sequence
actccattaacctcccatttttt

SEQ ID NO: 6465 - DNA, 23 bp, Artificial Sequence
  human ApoB siRNA sequence
ctccattaacctcccattttttg

SEQ ID NO: 6466 - DNA, 23 bp, Artificial Sequence
  human ApoB siRNA sequence
tccattaacctcccattttttga

SEQ ID NO: 6467 - DNA, 23 bp, Artificial Sequence
  human ApoB siRNA sequence
ccattaacctcccattttttgag

SEQ ID NO: 6468 - DNA, 23 bp, Artificial Sequence
  human ApoB siRNA sequence
cattaacctcccattttttgaga

SEQ ID NO: 6469 - DNA, 23 bp, Artificial Sequence
  human ApoB siRNA sequence
attaacctcccattttttgagac

SEQ ID NO: 6470 - DNA, 23 bp, Artificial Sequence
  human ApoB siRNA sequence
ttaacctcccattttttgagacc

SEQ ID NO: 6471 - DNA, 23 bp, Artificial Sequence
  human ApoB siRNA sequence
taacctcccattttttgagacct

SEQ ID NO: 6472 - DNA, 23 bp, Artificial Sequence
  human ApoB siRNA sequence
aacctcccattttttgagacctt

SEQ ID NO: 6473 - DNA, 23 bp, Artificial Sequence
  human ApoB siRNA sequence
acctcccattttttgagaccttg

SEQ ID NO: 6474 - DNA, 23 bp, Artificial Sequence
  human ApoB siRNA sequence
cctcccattttttgagaccttgc

SEQ ID NO: 6475 - DNA, 23 bp, Artificial Sequence
  human ApoB siRNA sequence
ctcccattttttgagaccttgca

SEQ ID NO: 6476 - DNA, 23 bp, Artificial Sequence
  human ApoB siRNA sequence
tcccattttttgagaccttgcaa

SEQ ID NO: 6477 - DNA, 23 bp, Artificial Sequence
  human ApoB siRNA sequence
cccattttttgagaccttgcaag

SEQ ID NO: 6478 - DNA, 23 bp, Artificial Sequence
  human ApoB siRNA sequence
ccattttttgagaccttgcaaga

SEQ ID NO: 6479 - DNA, 23 bp, Artificial Sequence
  human ApoB siRNA sequence
cattttttgagaccttgcaagaa

SEQ ID NO: 6480 - DNA, 23 bp, Artificial Sequence
  human ApoB siRNA sequence
attttttgagaccttgcaagaat

SEQ ID NO: 6481 - DNA, 23 bp, Artificial Sequence
  human ApoB siRNA sequence
ttttttgagaccttgcaagaata

SEQ ID NO: 6482 - DNA, 23 bp, Artificial Sequence
  human ApoB siRNA sequence
tttttgagaccttgcaagaatat

SEQ ID NO: 6483 - DNA, 23 bp, Artificial Sequence
  human ApoB siRNA sequence
ttttgagaccttgcaagaatatt

SEQ ID NO: 6484 - DNA, 23 bp, Artificial Sequence
  human ApoB siRNA sequence
tttgagaccttgcaagaatattt

SEQ ID NO: 6485 - DNA, 23 bp, Artificial Sequence
  human ApoB siRNA sequence
ttgagaccttgcaagaatatttt

SEQ ID NO: 6486 - DNA, 23 bp, Artificial Sequence
  human ApoB siRNA sequence
tgagaccttgcaagaatattttg

SEQ ID NO: 6487 - DNA, 23 bp, Artificial Sequence
  human ApoB siRNA sequence
gagaccttgcaagaatattttga

SEQ ID NO: 6488 - DNA, 23 bp, Artificial Sequence
  human ApoB siRNA sequence
agaccttgcaagaatattttgag

SEQ ID NO: 6489 - DNA, 23 bp, Artificial Sequence
  human ApoB siRNA sequence
gaccttgcaagaatattttgaga

SEQ ID NO: 6490 - DNA, 23 bp, Artificial Sequence
  human ApoB siRNA sequence
accttgcaagaatattttgagag

SEQ ID NO: 6491 - DNA, 23 bp, Artificial Sequence
  human ApoB siRNA sequence
ccttgcaagaatattttgagagg

SEQ ID NO: 6492 - DNA, 23 bp, Artificial Sequence
  human ApoB siRNA sequence
cttgcaagaatattttgagagga

SEQ ID NO: 6493 - DNA, 23 bp, Artificial Sequence
  human ApoB siRNA sequence
ttgcaagaatattttgagaggaa

SEQ ID NO: 6494 - DNA, 23 bp, Artificial Sequence
  human ApoB siRNA sequence
tgcaagaatattttgagaggaat

SEQ ID NO: 6495 - DNA, 23 bp, Artificial Sequence
  human ApoB siRNA sequence
gcaagaatattttgagaggaatc

SEQ ID NO: 6496 - DNA, 23 bp, Artificial Sequence
  human ApoB siRNA sequence
caagaatattttgagaggaatcg

SEQ ID NO: 6497 - DNA, 23 bp, Artificial Sequence
  human ApoB siRNA sequence
aagaatattttgagaggaatcga

SEQ ID NO: 6498 - DNA, 23 bp, Artificial Sequence
  human ApoB siRNA sequence
agaatattttgagaggaatcgac

SEQ ID NO: 6499 - DNA, 23 bp, Artificial Sequence
  human ApoB siRNA sequence
gaatattttgagaggaatcgaca

SEQ ID NO: 6500 - DNA, 23 bp, Artificial Sequence
  human ApoB siRNA sequence
aatattttgagaggaatcgacaa

SEQ ID NO: 6501 - DNA, 23 bp, Artificial Sequence
  human ApoB siRNA sequence
atattttgagaggaatcgacaaa

SEQ ID NO: 6502 - DNA, 23 bp, Artificial Sequence
  human ApoB siRNA sequence
tattttgagaggaatcgacaaac

SEQ ID NO: 6503 - DNA, 23 bp, Artificial Sequence
  human ApoB siRNA sequence
attttgagaggaatcgacaaacc

SEQ ID NO: 6504 - DNA, 23 bp, Artificial Sequence
  human ApoB siRNA sequence
ttttgagaggaatcgacaaacca

SEQ ID NO: 6505 - DNA, 23 bp, Artificial Sequence
  human ApoB siRNA sequence
tttgagaggaatcgacaaaccat

SEQ ID NO: 6506 - DNA, 23 bp, Artificial Sequence
  human ApoB siRNA sequence
ttgagaggaatcgacaaaccatt

SEQ ID NO: 6507 - DNA, 23 bp, Artificial Sequence
  human ApoB siRNA sequence
tgagaggaatcgacaaaccatta

SEQ ID NO: 6508 - DNA, 23 bp, Artificial Sequence
  human ApoB siRNA sequence
gagaggaatcgacaaaccattat

SEQ ID NO: 6509 - DNA, 23 bp, Artificial Sequence
  human ApoB siRNA sequence
agaggaatcgacaaaccattata

SEQ ID NO: 6510 - DNA, 23 bp, Artificial Sequence
  human ApoB siRNA sequence
gaggaatcgacaaaccattatag

SEQ ID NO: 6511 - DNA, 23 bp, Artificial Sequence
  human ApoB siRNA sequence
aggaatcgacaaaccattatagt

SEQ ID NO: 6512 - DNA, 23 bp, Artificial Sequence
  human ApoB siRNA sequence
ggaatcgacaaaccattatagtt

SEQ ID NO: 6513 - DNA, 23 bp, Artificial Sequence
  human ApoB siRNA sequence
gaatcgacaaaccattatagttg

SEQ ID NO: 6514 - DNA, 23 bp, Artificial Sequence
  human ApoB siRNA sequence
aatcgacaaaccattatagttgt

SEQ ID NO: 6515 - DNA, 23 bp, Artificial Sequence
  human ApoB siRNA sequence
atcgacaaaccattatagttgta

SEQ ID NO: 6516 - DNA, 23 bp, Artificial Sequence
  human ApoB siRNA sequence
tcgacaaaccattatagttgtag

SEQ ID NO: 6517 - DNA, 23 bp, Artificial Sequence
  human ApoB siRNA sequence
cgacaaaccattatagttgtagt

SEQ ID NO: 6518 - DNA, 23 bp, Artificial Sequence
  human ApoB siRNA sequence
gacaaaccattatagttgtagtg

SEQ ID NO: 6519 - DNA, 23 bp, Artificial Sequence
  human ApoB siRNA sequence
acaaaccattatagttgtagtgg

SEQ ID NO: 6520 - DNA, 23 bp, Artificial Sequence
  human ApoB siRNA sequence
caaaccattatagttgtagtgga

SEQ ID NO: 6521 - DNA, 23 bp, Artificial Sequence
  human ApoB siRNA sequence
aaaccattatagttgtagtggaa

SEQ ID NO: 6522 - DNA, 23 bp, Artificial Sequence
  human ApoB siRNA sequence
aaccattatagttgtagtggaaa

SEQ ID NO: 6523 - DNA, 23 bp, Artificial Sequence
  human ApoB siRNA sequence
accattatagttgtagtggaaaa

SEQ ID NO: 6524 - DNA, 23 bp, Artificial Sequence
  human ApoB siRNA sequence
ccattatagttgtagtggaaaac

SEQ ID NO: 6525 - DNA, 23 bp, Artificial Sequence
  human ApoB siRNA sequence
cattatagttgtagtggaaaacg

SEQ ID NO: 6526 - DNA, 23 bp, Artificial Sequence
  human ApoB siRNA sequence
attatagttgtagtggaaaacgt

SEQ ID NO: 6527 - DNA, 23 bp, Artificial Sequence
  human ApoB siRNA sequence
ttatagttgtagtggaaaacgta

SEQ ID NO: 6528 - DNA, 23 bp, Artificial Sequence
  human ApoB siRNA sequence
tatagttgtagtggaaaacgtac

SEQ ID NO: 6529 - DNA, 23 bp, Artificial Sequence
  human ApoB siRNA sequence
atagttgtagtggaaaacgtaca

SEQ ID NO: 6530 - DNA, 23 bp, Artificial Sequence
  human ApoB siRNA sequence
tagttgtagtggaaaacgtacag

SEQ ID NO: 6531 - DNA, 23 bp, Artificial Sequence
  human ApoB siRNA sequence
agttgtagtggaaaacgtacaga

SEQ ID NO: 6532 - DNA, 23 bp, Artificial Sequence
  human ApoB siRNA sequence
gttgtagtggaaaacgtacagag

SEQ ID NO: 6533 - DNA, 23 bp, Artificial Sequence
  human ApoB siRNA sequence
ttgtagtggaaaacgtacagaga

SEQ ID NO: 6534 - DNA, 23 bp, Artificial Sequence
  human ApoB siRNA sequence
tgtagtggaaaacgtacagagaa

SEQ ID NO: 6535 - DNA, 23 bp, Artificial Sequence
  human ApoB siRNA sequence
gtagtggaaaacgtacagagaaa

SEQ ID NO: 6536 - DNA, 23 bp, Artificial Sequence
  human ApoB siRNA sequence
tagtggaaaacgtacagagaaac

SEQ ID NO: 6537 - DNA, 23 bp, Artificial Sequence
  human ApoB siRNA sequence
agtggaaaacgtacagagaaacc

SEQ ID NO: 6538 - DNA, 23 bp, Artificial Sequence
  human ApoB siRNA sequence
gtggaaaacgtacagagaaacct

SEQ ID NO: 6539 - DNA, 23 bp, Artificial Sequence
  human ApoB siRNA sequence
tggaaaacgtacagagaaacctg

SEQ ID NO: 6540 - DNA, 23 bp, Artificial Sequence
  human ApoB siRNA sequence
ggaaaacgtacagagaaacctga

SEQ ID NO: 6541 - DNA, 23 bp, Artificial Sequence
  human ApoB siRNA sequence
gaaaacgtacagagaaacctgaa

SEQ ID NO: 6542 - DNA, 23 bp, Artificial Sequence
  human ApoB siRNA sequence
aaaacgtacagagaaacctgaag

SEQ ID NO: 6543 - DNA, 23 bp, Artificial Sequence
  human ApoB siRNA sequence
aaacgtacagagaaacctgaagc

SEQ ID NO: 6544 - DNA, 23 bp, Artificial Sequence
  human ApoB siRNA sequence
aacgtacagagaaacctgaagca

SEQ ID NO: 6545 - DNA, 23 bp, Artificial Sequence
  human ApoB siRNA sequence
acgtacagagaaacctgaagcac

SEQ ID NO: 6546 - DNA, 23 bp, Artificial Sequence
  human ApoB siRNA sequence
cgtacagagaaacctgaagcaca

SEQ ID NO: 6547 - DNA, 23 bp, Artificial Sequence
  human ApoB siRNA sequence
gtacagagaaacctgaagcacat

SEQ ID NO: 6548 - DNA, 23 bp, Artificial Sequence
  human ApoB siRNA sequence
tacagagaaacctgaagcacatc

SEQ ID NO: 6549 - DNA, 23 bp, Artificial Sequence
  human ApoB siRNA sequence
acagagaaacctgaagcacatca

SEQ ID NO: 6550 - DNA, 23 bp, Artificial Sequence
  human ApoB siRNA sequence
cagagaaacctgaagcacatcaa

SEQ ID NO: 6551 - DNA, 23 bp, Artificial Sequence
  human ApoB siRNA sequence
agagaaacctgaagcacatcaat

SEQ ID NO: 6552 - DNA, 23 bp, Artificial Sequence
  human ApoB siRNA sequence
gagaaacctgaagcacatcaata

SEQ ID NO: 6553 - DNA, 23 bp, Artificial Sequence
  human ApoB siRNA sequence
agaaacctgaagcacatcaatat

SEQ ID NO: 6554 - DNA, 23 bp, Artificial Sequence
  human ApoB siRNA sequence
gaaacctgaagcacatcaatatt

SEQ ID NO: 6555 - DNA, 23 bp, Artificial Sequence
  human ApoB siRNA sequence
aaacctgaagcacatcaatattg

SEQ ID NO: 6556 - DNA, 23 bp, Artificial Sequence
  human ApoB siRNA sequence
aacctgaagcacatcaatattga

SEQ ID NO: 6557 - DNA, 23 bp, Artificial Sequence
  human ApoB siRNA sequence
acctgaagcacatcaatattgat

SEQ ID NO: 6558 - DNA, 23 bp, Artificial Sequence
  human ApoB siRNA sequence
cctgaagcacatcaatattgatc

SEQ ID NO: 6559 - DNA, 23 bp, Artificial Sequence
  human ApoB siRNA sequence
ctgaagcacatcaatattgatca

SEQ ID NO: 6560 - DNA, 23 bp, Artificial Sequence
  human ApoB siRNA sequence
tgaagcacatcaatattgatcaa

SEQ ID NO: 6561 - DNA, 23 bp, Artificial Sequence
  human ApoB siRNA sequence
gaagcacatcaatattgatcaat

SEQ ID NO: 6562 - DNA, 23 bp, Artificial Sequence
  human ApoB siRNA sequence
aagcacatcaatattgatcaatt

SEQ ID NO: 6563 - DNA, 23 bp, Artificial Sequence
  human ApoB siRNA sequence
agcacatcaatattgatcaattt

SEQ ID NO: 6564 - DNA, 23 bp, Artificial Sequence
  human ApoB siRNA sequence
gcacatcaatattgatcaatttg

SEQ ID NO: 6565 - DNA, 23 bp, Artificial Sequence
  human ApoB siRNA sequence
cacatcaatattgatcaatttgt

SEQ ID NO: 6566 - DNA, 23 bp, Artificial Sequence
  human ApoB siRNA sequence
acatcaatattgatcaatttgta

SEQ ID NO: 6567 - DNA, 23 bp, Artificial Sequence
  human ApoB siRNA sequence
catcaatattgatcaatttgtaa

SEQ ID NO: 6568 - DNA, 23 bp, Artificial Sequence
  human ApoB siRNA sequence
atcaatattgatcaatttgtaag

SEQ ID NO: 6569 - DNA, 23 bp, Artificial Sequence
  human ApoB siRNA sequence
tcaatattgatcaatttgtaaga

SEQ ID NO: 6570 - DNA, 23 bp, Artificial Sequence
  human ApoB siRNA sequence
caatattgatcaatttgtaagaa

SEQ ID NO: 6571 - DNA, 23 bp, Artificial Sequence
  human ApoB siRNA sequence
aatattgatcaatttgtaagaaa

SEQ ID NO: 6572 - DNA, 23 bp, Artificial Sequence
  human ApoB siRNA sequence
atattgatcaatttgtaagaaaa

SEQ ID NO: 6573 - DNA, 23 bp, Artificial Sequence
  human ApoB siRNA sequence
tattgatcaatttgtaagaaaat

SEQ ID NO: 6574 - DNA, 23 bp, Artificial Sequence
  human ApoB siRNA sequence
attgatcaatttgtaagaaaata

SEQ ID NO: 6575 - DNA, 23 bp, Artificial Sequence
  human ApoB siRNA sequence
ttgatcaatttgtaagaaaatac

SEQ ID NO: 6576 - DNA, 23 bp, Artificial Sequence
  human ApoB siRNA sequence
tgatcaatttgtaagaaaataca

SEQ ID NO: 6577 - DNA, 23 bp, Artificial Sequence
  human ApoB siRNA sequence
gatcaatttgtaagaaaatacag

SEQ ID NO: 6578 - DNA, 23 bp, Artificial Sequence
  human ApoB siRNA sequence
atcaatttgtaagaaaatacaga

SEQ ID NO: 6579 - DNA, 23 bp, Artificial Sequence
  human ApoB siRNA sequence
tcaatttgtaagaaaatacagag

SEQ ID NO: 6580 - DNA, 23 bp, Artificial Sequence
  human ApoB siRNA sequence
caatttgtaagaaaatacagagc

SEQ ID NO: 6581 - DNA, 23 bp, Artificial Sequence
  human ApoB siRNA sequence
aatttgtaagaaaatacagagca

SEQ ID NO: 6582 - DNA, 23 bp, Artificial Sequence
  human ApoB siRNA sequence
atttgtaagaaaatacagagcag

SEQ ID NO: 6583 - DNA, 23 bp, Artificial Sequence
  human ApoB siRNA sequence
tttgtaagaaaatacagagcagc

SEQ ID NO: 6584 - DNA, 23 bp, Artificial Sequence
  human ApoB siRNA sequence
ttgtaagaaaatacagagcagcc

SEQ ID NO: 6585 - DNA, 23 bp, Artificial Sequence
  human ApoB siRNA sequence
tgtaagaaaatacagagcagccc

SEQ ID NO: 6586 - DNA, 23 bp, Artificial Sequence
  human ApoB siRNA sequence
gtaagaaaatacagagcagccct

SEQ ID NO: 6587 - DNA, 23 bp, Artificial Sequence
  human ApoB siRNA sequence
taagaaaatacagagcagccctg

SEQ ID NO: 6588 - DNA, 23 bp, Artificial Sequence
  human ApoB siRNA sequence
aagaaaatacagagcagccctgg

SEQ ID NO: 6589 - DNA, 23 bp, Artificial Sequence
  human ApoB siRNA sequence
agaaaatacagagcagccctggg

SEQ ID NO: 6590 - DNA, 23 bp, Artificial Sequence
  human ApoB siRNA sequence
gaaaatacagagcagccctggga

SEQ ID NO: 6591 - DNA, 23 bp, Artificial Sequence
  human ApoB siRNA sequence
aaaatacagagcagccctgggaa

SEQ ID NO: 6592 - DNA, 23 bp, Artificial Sequence
  human ApoB siRNA sequence
aaatacagagcagccctgggaaa

SEQ ID NO: 6593 - DNA, 23 bp, Artificial Sequence
  human ApoB siRNA sequence
aatacagagcagccctgggaaaa

SEQ ID NO: 6594 - DNA, 23 bp, Artificial Sequence
  human ApoB siRNA sequence
atacagagcagccctgggaaaac

SEQ ID NO: 6595 - DNA, 23 bp, Artificial Sequence
  human ApoB siRNA sequence
tacagagcagccctgggaaaact

SEQ ID NO: 6596 - DNA, 23 bp, Artificial Sequence
  human ApoB siRNA sequence
acagagcagccctgggaaaactc

SEQ ID NO: 6597 - DNA, 23 bp, Artificial Sequence
  human ApoB siRNA sequence
cagagcagccctgggaaaactcc

SEQ ID NO: 6598 - DNA, 23 bp, Artificial Sequence
  human ApoB siRNA sequence
agagcagccctgggaaaactccc

SEQ ID NO: 6599 - DNA, 23 bp, Artificial Sequence
  human ApoB siRNA sequence
gagcagccctgggaaaactccca

SEQ ID NO: 6600 - DNA, 23 bp, Artificial Sequence
  human ApoB siRNA sequence
agcagccctgggaaaactcccac

SEQ ID NO: 6601 - DNA, 23 bp, Artificial Sequence
  human ApoB siRNA sequence
gcagccctgggaaaactcccaca

SEQ ID NO: 6602 - DNA, 23 bp, Artificial Sequence
  human ApoB siRNA sequence
cagccctgggaaaactcccacag

SEQ ID NO: 6603 - DNA, 23 bp, Artificial Sequence
  human ApoB siRNA sequence
agccctgggaaaactcccacagc

SEQ ID NO: 6604 - DNA, 23 bp, Artificial Sequence
  human ApoB siRNA sequence
gccctgggaaaactcccacagca

SEQ ID NO: 6605 - DNA, 23 bp, Artificial Sequence
  human ApoB siRNA sequence
ccctgggaaaactcccacagcaa

SEQ ID NO: 6606 - DNA, 23 bp, Artificial Sequence
  human ApoB siRNA sequence
cctgggaaaactcccacagcaag

SEQ ID NO: 6607 - DNA, 23 bp, Artificial Sequence
  human ApoB siRNA sequence
ctgggaaaactcccacagcaagc

SEQ ID NO: 6608 - DNA, 23 bp, Artificial Sequence
  human ApoB siRNA sequence
tgggaaaactcccacagcaagct

SEQ ID NO: 6609 - DNA, 23 bp, Artificial Sequence
  human ApoB siRNA sequence
gggaaaactcccacagcaagcta

SEQ ID NO: 6610 - DNA, 23 bp, Artificial Sequence
  human ApoB siRNA sequence
ggaaaactcccacagcaagctaa

SEQ ID NO: 6611 - DNA, 23 bp, Artificial Sequence
  human ApoB siRNA sequence
gaaaactcccacagcaagctaat

SEQ ID NO: 6612 - DNA, 23 bp, Artificial Sequence
  human ApoB siRNA sequence
aaaactcccacagcaagctaatg

SEQ ID NO: 6613 - DNA, 23 bp, Artificial Sequence
  human ApoB siRNA sequence
aaactcccacagcaagctaatga

SEQ ID NO: 6614 - DNA, 23 bp, Artificial Sequence
  human ApoB siRNA sequence
aactcccacagcaagctaatgat

SEQ ID NO: 6615 - DNA, 23 bp, Artificial Sequence
  human ApoB siRNA sequence
actcccacagcaagctaatgatt

SEQ ID NO: 6616 - DNA, 23 bp, Artificial Sequence
  human ApoB siRNA sequence
ctcccacagcaagctaatgatta

SEQ ID NO: 6617 - DNA, 23 bp, Artificial Sequence
  human ApoB siRNA sequence
tcccacagcaagctaatgattat

SEQ ID NO: 6618 - DNA, 23 bp, Artificial Sequence
  human ApoB siRNA sequence
cccacagcaagctaatgattatc

SEQ ID NO: 6619 - DNA, 23 bp, Artificial Sequence
  human ApoB siRNA sequence
ccacagcaagctaatgattatct

SEQ ID NO: 6620 - DNA, 23 bp, Artificial Sequence
  human ApoB siRNA sequence
cacagcaagctaatgattatctg

SEQ ID NO: 6621 - DNA, 23 bp, Artificial Sequence
  human ApoB siRNA sequence
acagcaagctaatgattatctga

SEQ ID NO: 6622 - DNA, 23 bp, Artificial Sequence
  human ApoB siRNA sequence
cagcaagctaatgattatctgaa

SEQ ID NO: 6623 - DNA, 23 bp, Artificial Sequence
  human ApoB siRNA sequence
agcaagctaatgattatctgaat

SEQ ID NO: 6624 - DNA, 23 bp, Artificial Sequence
  human ApoB siRNA sequence
gcaagctaatgattatctgaatt

SEQ ID NO: 6625 - DNA, 23 bp, Artificial Sequence
  human ApoB siRNA sequence
caagctaatgattatctgaattc

SEQ ID NO: 6626 - DNA, 23 bp, Artificial Sequence
  human ApoB siRNA sequence
aagctaatgattatctgaattca

SEQ ID NO: 6627 - DNA, 23 bp, Artificial Sequence
  human ApoB siRNA sequence
agctaatgattatctgaattcat

SEQ ID NO: 6628 - DNA, 23 bp, Artificial Sequence
  human ApoB siRNA sequence
gctaatgattatctgaattcatt

SEQ ID NO: 6629 - DNA, 23 bp, Artificial Sequence
  human ApoB siRNA sequence
ctaatgattatctgaattcattc

SEQ ID NO: 6630 - DNA, 23 bp, Artificial Sequence
  human ApoB siRNA sequence
taatgattatctgaattcattca

SEQ ID NO: 6631 - DNA, 23 bp, Artificial Sequence
  human ApoB siRNA sequence
aatgattatctgaattcattcaa

SEQ ID NO: 6632 - DNA, 23 bp, Artificial Sequence
  human ApoB siRNA sequence
atgattatctgaattcattcaat

SEQ ID NO: 6633 - DNA, 23 bp, Artificial Sequence
  human ApoB siRNA sequence
tgattatctgaattcattcaatt

SEQ ID NO: 6634 - DNA, 23 bp, Artificial Sequence
  human ApoB siRNA sequence
gattatctgaattcattcaattg

SEQ ID NO: 6635 - DNA, 23 bp, Artificial Sequence
  human ApoB siRNA sequence
attatctgaattcattcaattgg

SEQ ID NO: 6636 - DNA, 23 bp, Artificial Sequence
  human ApoB siRNA sequence
ttatctgaattcattcaattggg

SEQ ID NO: 6637 - DNA, 23 bp, Artificial Sequence
  human ApoB siRNA sequence
tatctgaattcattcaattggga

SEQ ID NO: 6638 - DNA, 23 bp, Artificial Sequence
  human ApoB siRNA sequence
atctgaattcattcaattgggag

SEQ ID NO: 6639 - DNA, 23 bp, Artificial Sequence
  human ApoB siRNA sequence
tctgaattcattcaattgggaga

SEQ ID NO: 6640 - DNA, 23 bp, Artificial Sequence
  human ApoB siRNA sequence
ctgaattcattcaattgggagag

SEQ ID NO: 6641 - DNA, 23 bp, Artificial Sequence
  human ApoB siRNA sequence
tgaattcattcaattgggagaga

SEQ ID NO: 6642 - DNA, 23 bp, Artificial Sequence
  human ApoB siRNA sequence
gaattcattcaattgggagagac

SEQ ID NO: 6643 - DNA, 23 bp, Artificial Sequence
  human ApoB siRNA sequence
aattcattcaattgggagagaca

SEQ ID NO: 6644 - DNA, 23 bp, Artificial Sequence
  human ApoB siRNA sequence
attcattcaattgggagagacaa

SEQ ID NO: 6645 - DNA, 23 bp, Artificial Sequence
  human ApoB siRNA sequence
ttcattcaattgggagagacaag

SEQ ID NO: 6646 - DNA, 23 bp, Artificial Sequence
  human ApoB siRNA sequence
tcattcaattgggagagacaagt

SEQ ID NO: 6647 - DNA, 23 bp, Artificial Sequence
  human ApoB siRNA sequence
cattcaattgggagagacaagtt

SEQ ID NO: 6648 - DNA, 23 bp, Artificial Sequence
  human ApoB siRNA sequence
attcaattgggagagacaagttt

SEQ ID NO: 6649 - DNA, 23 bp, Artificial Sequence
  human ApoB siRNA sequence
ttcaattgggagagacaagtttc

SEQ ID NO: 6650 - DNA, 23 bp, Artificial Sequence
  human ApoB siRNA sequence
tcaattgggagagacaagtttca

SEQ ID NO: 6651 - DNA, 23 bp, Artificial Sequence
  human ApoB siRNA sequence
caattgggagagacaagtttcac

SEQ ID NO: 6652 - DNA, 23 bp, Artificial Sequence
  human ApoB siRNA sequence
aattgggagagacaagtttcaca

SEQ ID NO: 6653 - DNA, 23 bp, Artificial Sequence
  human ApoB siRNA sequence
attgggagagacaagtttcacat

SEQ ID NO: 6654 - DNA, 23 bp, Artificial Sequence
  human ApoB siRNA sequence
ttgggagagacaagtttcacatg

SEQ ID NO: 6655 - DNA, 23 bp, Artificial Sequence
  human ApoB siRNA sequence
tgggagagacaagtttcacatgc

SEQ ID NO: 6656 - DNA, 23 bp, Artificial Sequence
  human ApoB siRNA sequence
gggagagacaagtttcacatgcc

SEQ ID NO: 6657 - DNA, 23 bp, Artificial Sequence
  human ApoB siRNA sequence
ggagagacaagtttcacatgcca

SEQ ID NO: 6658 - DNA, 23 bp, Artificial Sequence
  human ApoB siRNA sequence
gagagacaagtttcacatgccaa

SEQ ID NO: 6659 - DNA, 23 bp, Artificial Sequence
  human ApoB siRNA sequence
agagacaagtttcacatgccaag

SEQ ID NO: 6660 - DNA, 23 bp, Artificial Sequence
  human ApoB siRNA sequence
gagacaagtttcacatgccaagg

SEQ ID NO: 6661 - DNA, 23 bp, Artificial Sequence
  human ApoB siRNA sequence
agacaagtttcacatgccaagga

SEQ ID NO: 6662 - DNA, 23 bp, Artificial Sequence
  human ApoB siRNA sequence
gacaagtttcacatgccaaggag

SEQ ID NO: 6663 - DNA, 23 bp, Artificial Sequence
  human ApoB siRNA sequence
acaagtttcacatgccaaggaga

SEQ ID NO: 6664 - DNA, 23 bp, Artificial Sequence
  human ApoB siRNA sequence
caagtttcacatgccaaggagaa

SEQ ID NO: 6665 - DNA, 23 bp, Artificial Sequence
  human ApoB siRNA sequence
aagtttcacatgccaaggagaaa

SEQ ID NO: 6666 - DNA, 23 bp, Artificial Sequence
  human ApoB siRNA sequence
agtttcacatgccaaggagaaac

SEQ ID NO: 6667 - DNA, 23 bp, Artificial Sequence
  human ApoB siRNA sequence
gtttcacatgccaaggagaaact

SEQ ID NO: 6668 - DNA, 23 bp, Artificial Sequence
  human ApoB siRNA sequence
tttcacatgccaaggagaaactg

SEQ ID NO: 6669 - DNA, 23 bp, Artificial Sequence
  human ApoB siRNA sequence
ttcacatgccaaggagaaactga

SEQ ID NO: 6670 - DNA, 23 bp, Artificial Sequence
  human ApoB siRNA sequence
tcacatgccaaggagaaactgac

SEQ ID NO: 6671 - DNA, 23 bp, Artificial Sequence
  human ApoB siRNA sequence
cacatgccaaggagaaactgact

SEQ ID NO: 6672 - DNA, 23 bp, Artificial Sequence
  human ApoB siRNA sequence
acatgccaaggagaaactgactg

SEQ ID NO: 6673 - DNA, 23 bp, Artificial Sequence
  human ApoB siRNA sequence
catgccaaggagaaactgactgc

SEQ ID NO: 6674 - DNA, 23 bp, Artificial Sequence
  human ApoB siRNA sequence
atgccaaggagaaactgactgct

SEQ ID NO: 6675 - DNA, 23 bp, Artificial Sequence
  human ApoB siRNA sequence
tgccaaggagaaactgactgctc

SEQ ID NO: 6676 - DNA, 23 bp, Artificial Sequence
  human ApoB siRNA sequence
gccaaggagaaactgactgctct

SEQ ID NO: 6677 - DNA, 23 bp, Artificial Sequence
  human ApoB siRNA sequence
ccaaggagaaactgactgctctc

SEQ ID NO: 6678 - DNA, 23 bp, Artificial Sequence
  human ApoB siRNA sequence
caaggagaaactgactgctctca

SEQ ID NO: 6679 - DNA, 23 bp, Artificial Sequence
  human ApoB siRNA sequence
aaggagaaactgactgctctcac

SEQ ID NO: 6680 - DNA, 23 bp, Artificial Sequence
  human ApoB siRNA sequence
aggagaaactgactgctctcaca

SEQ ID NO: 6681 - DNA, 23 bp, Artificial Sequence
  human ApoB siRNA sequence
ggagaaactgactgctctcacaa

SEQ ID NO: 6682 - DNA, 23 bp, Artificial Sequence
  human ApoB siRNA sequence
gagaaactgactgctctcacaaa

SEQ ID NO: 6683 - DNA, 23 bp, Artificial Sequence
  human ApoB siRNA sequence
agaaactgactgctctcacaaaa

SEQ ID NO: 6684 - DNA, 23 bp, Artificial Sequence
  human ApoB siRNA sequence
gaaactgactgctctcacaaaaa

SEQ ID NO: 6685 - DNA, 23 bp, Artificial Sequence
  human ApoB siRNA sequence
aaactgactgctctcacaaaaaa

SEQ ID NO: 6686 - DNA, 23 bp, Artificial Sequence
  human ApoB siRNA sequence
aactgactgctctcacaaaaaag

SEQ ID NO: 6687 - DNA, 23 bp, Artificial Sequence
  human ApoB siRNA sequence
actgactgctctcacaaaaaagt

SEQ ID NO: 6688 - DNA, 23 bp, Artificial Sequence
  human ApoB siRNA sequence
ctgactgctctcacaaaaaagta

SEQ ID NO: 6689 - DNA, 23 bp, Artificial Sequence
  human ApoB siRNA sequence
tgactgctctcacaaaaaagtat

SEQ ID NO: 6690 - DNA, 23 bp, Artificial Sequence
  human ApoB siRNA sequence
gactgctctcacaaaaaagtata

SEQ ID NO: 6691 - DNA, 23 bp, Artificial Sequence
  human ApoB siRNA sequence
actgctctcacaaaaaagtatag

SEQ ID NO: 6692 - DNA, 23 bp, Artificial Sequence
  human ApoB siRNA sequence
ctgctctcacaaaaaagtataga

SEQ ID NO: 6693 - DNA, 23 bp, Artificial Sequence
  human ApoB siRNA sequence
tgctctcacaaaaaagtatagaa

SEQ ID NO: 6694 - DNA, 23 bp, Artificial Sequence
  human ApoB siRNA sequence
gctctcacaaaaaagtatagaat

SEQ ID NO: 6695 - DNA, 23 bp, Artificial Sequence
  human ApoB siRNA sequence
ctctcacaaaaaagtatagaatt

SEQ ID NO: 6696 - DNA, 23 bp, Artificial Sequence
  human ApoB siRNA sequence
tctcacaaaaaagtatagaatta

SEQ ID NO: 6697 - DNA, 23 bp, Artificial Sequence
  human ApoB siRNA sequence
ctcacaaaaaagtatagaattac

SEQ ID NO: 6698 - DNA, 23 bp, Artificial Sequence
  human ApoB siRNA sequence
tcacaaaaaagtatagaattaca

SEQ ID NO: 6699 - DNA, 23 bp, Artificial Sequence
  human ApoB siRNA sequence
cacaaaaaagtatagaattacag

SEQ ID NO: 6700 - DNA, 23 bp, Artificial Sequence
  human ApoB siRNA sequence
acaaaaaagtatagaattacaga

SEQ ID NO: 6701 - DNA, 23 bp, Artificial Sequence
  human ApoB siRNA sequence
caaaaaagtatagaattacagaa

SEQ ID NO: 6702 - DNA, 23 bp, Artificial Sequence
  human ApoB siRNA sequence
aaaaaagtatagaattacagaaa

SEQ ID NO: 6703 - DNA, 23 bp, Artificial Sequence
  human ApoB siRNA sequence
aaaaagtatagaattacagaaaa

SEQ ID NO: 6704 - DNA, 23 bp, Artificial Sequence
  human ApoB siRNA sequence
aaaagtatagaattacagaaaat

SEQ ID NO: 6705 - DNA, 23 bp, Artificial Sequence
  human ApoB siRNA sequence
aaagtatagaattacagaaaatg

SEQ ID NO: 6706 - DNA, 23 bp, Artificial Sequence
  human ApoB siRNA sequence
aagtatagaattacagaaaatga

SEQ ID NO: 6707 - DNA, 23 bp, Artificial Sequence
  human ApoB siRNA sequence
agtatagaattacagaaaatgat

SEQ ID NO: 6708 - DNA, 23 bp, Artificial Sequence
  human ApoB siRNA sequence
gtatagaattacagaaaatgata

SEQ ID NO: 6709 - DNA, 23 bp, Artificial Sequence
  human ApoB siRNA sequence
tatagaattacagaaaatgatat

SEQ ID NO: 6710 - DNA, 23 bp, Artificial Sequence
  human ApoB siRNA sequence
atagaattacagaaaatgatata

SEQ ID NO: 6711 - DNA, 23 bp, Artificial Sequence
  human ApoB siRNA sequence
tagaattacagaaaatgatatac

SEQ ID NO: 6712 - DNA, 23 bp, Artificial Sequence
  human ApoB siRNA sequence
agaattacagaaaatgatataca

SEQ ID NO: 6713 - DNA, 23 bp, Artificial Sequence
  human ApoB siRNA sequence
gaattacagaaaatgatatacaa

SEQ ID NO: 6714 - DNA, 23 bp, Artificial Sequence
  human ApoB siRNA sequence
aattacagaaaatgatatacaaa

SEQ ID NO: 6715 - DNA, 23 bp, Artificial Sequence
  human ApoB siRNA sequence
attacagaaaatgatatacaaat

SEQ ID NO: 6716 - DNA, 23 bp, Artificial Sequence
  human ApoB siRNA sequence
ttacagaaaatgatatacaaatt

SEQ ID NO: 6717 - DNA, 23 bp, Artificial Sequence
  human ApoB siRNA sequence
tacagaaaatgatatacaaattg

SEQ ID NO: 6718 - DNA, 23 bp, Artificial Sequence
  human ApoB siRNA sequence
acagaaaatgatatacaaattgc

SEQ ID NO: 6719 - DNA, 23 bp, Artificial Sequence
  human ApoB siRNA sequence
cagaaaatgatatacaaattgca

SEQ ID NO: 6720 - DNA, 23 bp, Artificial Sequence
  human ApoB siRNA sequence
agaaaatgatatacaaattgcat

SEQ ID NO: 6721 - DNA, 23 bp, Artificial Sequence
  human ApoB siRNA sequence
gaaaatgatatacaaattgcatt

SEQ ID NO: 6722 - DNA, 23 bp, Artificial Sequence
  human ApoB siRNA sequence
aaaatgatatacaaattgcatta

SEQ ID NO: 6723 - DNA, 23 bp, Artificial Sequence
  human ApoB siRNA sequence
aaatgatatacaaattgcattag

SEQ ID NO: 6724 - DNA, 23 bp, Artificial Sequence
  human ApoB siRNA sequence
aatgatatacaaattgcattaga

SEQ ID NO: 6725 - DNA, 23 bp, Artificial Sequence
  human ApoB siRNA sequence
atgatatacaaattgcattagat

SEQ ID NO: 6726 - DNA, 23 bp, Artificial Sequence
  human ApoB siRNA sequence
tgatatacaaattgcattagatg

SEQ ID NO: 6727 - DNA, 23 bp, Artificial Sequence
  human ApoB siRNA sequence
gatatacaaattgcattagatga

SEQ ID NO: 6728 - DNA, 23 bp, Artificial Sequence
  human ApoB siRNA sequence
atatacaaattgcattagatgat

SEQ ID NO: 6729 - DNA, 23 bp, Artificial Sequence
  human ApoB siRNA sequence
tatacaaattgcattagatgatg

SEQ ID NO: 6730 - DNA, 23 bp, Artificial Sequence
  human ApoB siRNA sequence
atacaaattgcattagatgatgc

SEQ ID NO: 6731 - DNA, 23 bp, Artificial Sequence
  human ApoB siRNA sequence
tacaaattgcattagatgatgcc

SEQ ID NO: 6732 - DNA, 23 bp, Artificial Sequence
  human ApoB siRNA sequence
acaaattgcattagatgatgcca

SEQ ID NO: 6733 - DNA, 23 bp, Artificial Sequence
  human ApoB siRNA sequence
caaattgcattagatgatgccaa

SEQ ID NO: 6734 - DNA, 23 bp, Artificial Sequence
  human ApoB siRNA sequence
aaattgcattagatgatgccaaa

SEQ ID NO: 6735 - DNA, 23 bp, Artificial Sequence
  human ApoB siRNA sequence
aattgcattagatgatgccaaaa

SEQ ID NO: 6736 - DNA, 23 bp, Artificial Sequence
  human ApoB siRNA sequence
attgcattagatgatgccaaaat

SEQ ID NO: 6737 - DNA, 23 bp, Artificial Sequence
  human ApoB siRNA sequence
ttgcattagatgatgccaaaatc

SEQ ID NO: 6738 - DNA, 23 bp, Artificial Sequence
  human ApoB siRNA sequence
tgcattagatgatgccaaaatca

SEQ ID NO: 6739 - DNA, 23 bp, Artificial Sequence
  human ApoB siRNA sequence
gcattagatgatgccaaaatcaa

SEQ ID NO: 6740 - DNA, 23 bp, Artificial Sequence
  human ApoB siRNA sequence
cattagatgatgccaaaatcaac

SEQ ID NO: 6741 - DNA, 23 bp, Artificial Sequence
  human ApoB siRNA sequence
attagatgatgccaaaatcaact

SEQ ID NO: 6742 - DNA, 23 bp, Artificial Sequence
  human ApoB siRNA sequence
ttagatgatgccaaaatcaactt

SEQ ID NO: 6743 - DNA, 23 bp, Artificial Sequence
  human ApoB siRNA sequence
tagatgatgccaaaatcaacttt

SEQ ID NO: 6744 - DNA, 23 bp, Artificial Sequence
  human ApoB siRNA sequence
agatgatgccaaaatcaacttta

SEQ ID NO: 6745 - DNA, 23 bp, Artificial Sequence
  human ApoB siRNA sequence
gatgatgccaaaatcaactttaa

SEQ ID NO: 6746 - DNA, 23 bp, Artificial Sequence
  human ApoB siRNA sequence
atgatgccaaaatcaactttaat

SEQ ID NO: 6747 - DNA, 23 bp, Artificial Sequence
  human ApoB siRNA sequence
tgatgccaaaatcaactttaatg

SEQ ID NO: 6748 - DNA, 23 bp, Artificial Sequence
  human ApoB siRNA sequence
gatgccaaaatcaactttaatga

SEQ ID NO: 6749 - DNA, 23 bp, Artificial Sequence
  human ApoB siRNA sequence
atgccaaaatcaactttaatgaa

SEQ ID NO: 6750 - DNA, 23 bp, Artificial Sequence
  human ApoB siRNA sequence
tgccaaaatcaactttaatgaaa

SEQ ID NO: 6751 - DNA, 23 bp, Artificial Sequence
  human ApoB siRNA sequence
gccaaaatcaactttaatgaaaa

SEQ ID NO: 6752 - DNA, 23 bp, Artificial Sequence
  human ApoB siRNA sequence
ccaaaatcaactttaatgaaaaa

SEQ ID NO: 6753 - DNA, 23 bp, Artificial Sequence
  human ApoB siRNA sequence
caaaatcaactttaatgaaaaac

SEQ ID NO: 6754 - DNA, 23 bp, Artificial Sequence
  human ApoB siRNA sequence
aaaatcaactttaatgaaaaact

SEQ ID NO: 6755 - DNA, 23 bp, Artificial Sequence
  human ApoB siRNA sequence
aaatcaactttaatgaaaaacta

SEQ ID NO: 6756 - DNA, 23 bp, Artificial Sequence
  human ApoB siRNA sequence
aatcaactttaatgaaaaactat

SEQ ID NO: 6757 - DNA, 23 bp, Artificial Sequence
  human ApoB siRNA sequence
atcaactttaatgaaaaactatc

SEQ ID NO: 6758 - DNA, 23 bp, Artificial Sequence
  human ApoB siRNA sequence
tcaactttaatgaaaaactatct

SEQ ID NO: 6759 - DNA, 23 bp, Artificial Sequence
  human ApoB siRNA sequence
caactttaatgaaaaactatctc

SEQ ID NO: 6760 - DNA, 23 bp, Artificial Sequence
  human ApoB siRNA sequence
aactttaatgaaaaactatctca

SEQ ID NO: 6761 - DNA, 23 bp, Artificial Sequence
  human ApoB siRNA sequence
actttaatgaaaaactatctcaa

SEQ ID NO: 6762 - DNA, 23 bp, Artificial Sequence
  human ApoB siRNA sequence
ctttaatgaaaaactatctcaac

SEQ ID NO: 6763 - DNA, 23 bp, Artificial Sequence
  human ApoB siRNA sequence
tttaatgaaaaactatctcaact

SEQ ID NO: 6764 - DNA, 23 bp, Artificial Sequence
  human ApoB siRNA sequence
ttaatgaaaaactatctcaactg

SEQ ID NO: 6765 - DNA, 23 bp, Artificial Sequence
  human ApoB siRNA sequence
taatgaaaaactatctcaactgc

SEQ ID NO: 6766 - DNA, 23 bp, Artificial Sequence
  human ApoB siRNA sequence
aatgaaaaactatctcaactgca

SEQ ID NO: 6767 - DNA, 23 bp, Artificial Sequence
  human ApoB siRNA sequence
atgaaaaactatctcaactgcag

SEQ ID NO: 6768 - DNA, 23 bp, Artificial Sequence
  human ApoB siRNA sequence
tgaaaaactatctcaactgcaga

SEQ ID NO: 6769 - DNA, 23 bp, Artificial Sequence
  human ApoB siRNA sequence
gaaaaactatctcaactgcagac

SEQ ID NO: 6770 - DNA, 23 bp, Artificial Sequence
  human ApoB siRNA sequence
aaaaactatctcaactgcagaca

SEQ ID NO: 6771 - DNA, 23 bp, Artificial Sequence
  human ApoB siRNA sequence
aaaactatctcaactgcagacat

SEQ ID NO: 6772 - DNA, 23 bp, Artificial Sequence
  human ApoB siRNA sequence
aaactatctcaactgcagacata

SEQ ID NO: 6773 - DNA, 23 bp, Artificial Sequence
  human ApoB siRNA sequence
aactatctcaactgcagacatat

SEQ ID NO: 6774 - DNA, 23 bp, Artificial Sequence
  human ApoB siRNA sequence
actatctcaactgcagacatata

SEQ ID NO: 6775 - DNA, 23 bp, Artificial Sequence
  human ApoB siRNA sequence
ctatctcaactgcagacatatat

SEQ ID NO: 6776 - DNA, 23 bp, Artificial Sequence
  human ApoB siRNA sequence
tatctcaactgcagacatatatg

SEQ ID NO: 6777 - DNA, 23 bp, Artificial Sequence
  human ApoB siRNA sequence
atctcaactgcagacatatatga

SEQ ID NO: 6778 - DNA, 23 bp, Artificial Sequence
  human ApoB siRNA sequence
tctcaactgcagacatatatgat

SEQ ID NO: 6779 - DNA, 23 bp, Artificial Sequence
  human ApoB siRNA sequence
ctcaactgcagacatatatgata

SEQ ID NO: 6780 - DNA, 23 bp, Artificial Sequence
  human ApoB siRNA sequence
tcaactgcagacatatatgatac

SEQ ID NO: 6781 - DNA, 23 bp, Artificial Sequence
  human ApoB siRNA sequence
caactgcagacatatatgataca

SEQ ID NO: 6782 - DNA, 23 bp, Artificial Sequence
  human ApoB siRNA sequence
aactgcagacatatatgatacaa

SEQ ID NO: 6783 - DNA, 23 bp, Artificial Sequence
  human ApoB siRNA sequence
actgcagacatatatgatacaat

SEQ ID NO: 6784 - DNA, 23 bp, Artificial Sequence
  human ApoB siRNA sequence
ctgcagacatatatgatacaatt

SEQ ID NO: 6785 - DNA, 23 bp, Artificial Sequence
  human ApoB siRNA sequence
tgcagacatatatgatacaattt

SEQ ID NO: 6786 - DNA, 23 bp, Artificial Sequence
  human ApoB siRNA sequence
gcagacatatatgatacaatttg

SEQ ID NO: 6787 - DNA, 23 bp, Artificial Sequence
  human ApoB siRNA sequence
cagacatatatgatacaatttga

SEQ ID NO: 6788 - DNA, 23 bp, Artificial Sequence
  human ApoB siRNA sequence
agacatatatgatacaatttgat

SEQ ID NO: 6789 - DNA, 23 bp, Artificial Sequence
  human ApoB siRNA sequence
gacatatatgatacaatttgatc

SEQ ID NO: 6790 - DNA, 23 bp, Artificial Sequence
  human ApoB siRNA sequence
acatatatgatacaatttgatca

SEQ ID NO: 6791 - DNA, 23 bp, Artificial Sequence
  human ApoB siRNA sequence
catatatgatacaatttgatcag

SEQ ID NO: 6792 - DNA, 23 bp, Artificial Sequence
  human ApoB siRNA sequence
atatatgatacaatttgatcagt

SEQ ID NO: 6793 - DNA, 23 bp, Artificial Sequence
  human ApoB siRNA sequence
tatatgatacaatttgatcagta

SEQ ID NO: 6794 - DNA, 23 bp, Artificial Sequence
  human ApoB siRNA sequence
atatgatacaatttgatcagtat

SEQ ID NO: 6795 - DNA, 23 bp, Artificial Sequence
  human ApoB siRNA sequence
tatgatacaatttgatcagtata

SEQ ID NO: 6796 - DNA, 23 bp, Artificial Sequence
  human ApoB siRNA sequence
atgatacaatttgatcagtatat

SEQ ID NO: 6797 - DNA, 23 bp, Artificial Sequence
  human ApoB siRNA sequence
tgatacaatttgatcagtatatt

SEQ ID NO: 6798 - DNA, 23 bp, Artificial Sequence
  human ApoB siRNA sequence
gatacaatttgatcagtatatta

SEQ ID NO: 6799 - DNA, 23 bp, Artificial Sequence
  human ApoB siRNA sequence
atacaatttgatcagtatattaa

SEQ ID NO: 6800 - DNA, 23 bp, Artificial Sequence
  human ApoB siRNA sequence
tacaatttgatcagtatattaaa

SEQ ID NO: 6801 - DNA, 23 bp, Artificial Sequence
  human ApoB siRNA sequence
acaatttgatcagtatattaaag

SEQ ID NO: 6802 - DNA, 23 bp, Artificial Sequence
  human ApoB siRNA sequence
caatttgatcagtatattaaaga

SEQ ID NO: 6803 - DNA, 23 bp, Artificial Sequence
  human ApoB siRNA sequence
aatttgatcagtatattaaagat

SEQ ID NO: 6804 - DNA, 23 bp, Artificial Sequence
  human ApoB siRNA sequence
atttgatcagtatattaaagata

SEQ ID NO: 6805 - DNA, 23 bp, Artificial Sequence
  human ApoB siRNA sequence
tttgatcagtatattaaagatag

SEQ ID NO: 6806 - DNA, 23 bp, Artificial Sequence
  human ApoB siRNA sequence
ttgatcagtatattaaagatagt

SEQ ID NO: 6807 - DNA, 23 bp, Artificial Sequence
  human ApoB siRNA sequence
tgatcagtatattaaagatagtt

SEQ ID NO: 6808 - DNA, 23 bp, Artificial Sequence
  human ApoB siRNA sequence
gatcagtatattaaagatagtta

SEQ ID NO: 6809 - DNA, 23 bp, Artificial Sequence
  human ApoB siRNA sequence
atcagtatattaaagatagttat

SEQ ID NO: 6810 - DNA, 23 bp, Artificial Sequence
  human ApoB siRNA sequence
tcagtatattaaagatagttatg

SEQ ID NO: 6811 - DNA, 23 bp, Artificial Sequence
  human ApoB siRNA sequence
cagtatattaaagatagttatga

SEQ ID NO: 6812 - DNA, 23 bp, Artificial Sequence
  human ApoB siRNA sequence
agtatattaaagatagttatgat

SEQ ID NO: 6813 - DNA, 23 bp, Artificial Sequence
  human ApoB siRNA sequence
gtatattaaagatagttatgatt

SEQ ID NO: 6814 - DNA, 23 bp, Artificial Sequence
  human ApoB siRNA sequence
tatattaaagatagttatgattt

SEQ ID NO: 6815 - DNA, 23 bp, Artificial Sequence
  human ApoB siRNA sequence
atattaaagatagttatgattta

SEQ ID NO: 6816 - DNA, 23 bp, Artificial Sequence
  human ApoB siRNA sequence
tattaaagatagttatgatttac

SEQ ID NO: 6817 - DNA, 23 bp, Artificial Sequence
  human ApoB siRNA sequence
attaaagatagttatgatttaca

SEQ ID NO: 6818 - DNA, 23 bp, Artificial Sequence
  human ApoB siRNA sequence
ttaaagatagttatgatttacat

SEQ ID NO: 6819 - DNA, 23 bp, Artificial Sequence
  human ApoB siRNA sequence
taaagatagttatgatttacatg

SEQ ID NO: 6820 - DNA, 23 bp, Artificial Sequence
  human ApoB siRNA sequence
aaagatagttatgatttacatga

SEQ ID NO: 6821 - DNA, 23 bp, Artificial Sequence
  human ApoB siRNA sequence
aagatagttatgatttacatgat

SEQ ID NO: 6822 - DNA, 23 bp, Artificial Sequence
  human ApoB siRNA sequence
agatagttatgatttacatgatt

SEQ ID NO: 6823 - DNA, 23 bp, Artificial Sequence
  human ApoB siRNA sequence
gatagttatgatttacatgattt

SEQ ID NO: 6824 - DNA, 23 bp, Artificial Sequence
  human ApoB siRNA sequence
atagttatgatttacatgatttg

SEQ ID NO: 6825 - DNA, 23 bp, Artificial Sequence
  human ApoB siRNA sequence
tagttatgatttacatgatttga

SEQ ID NO: 6826 - DNA, 23 bp, Artificial Sequence
  human ApoB siRNA sequence
agttatgatttacatgatttgaa

SEQ ID NO: 6827 - DNA, 23 bp, Artificial Sequence
  human ApoB siRNA sequence
gttatgatttacatgatttgaaa

SEQ ID NO: 6828 - DNA, 23 bp, Artificial Sequence
  human ApoB siRNA sequence
ttatgatttacatgatttgaaaa

SEQ ID NO: 6829 - DNA, 23 bp, Artificial Sequence
  human ApoB siRNA sequence
tatgatttacatgatttgaaaat

SEQ ID NO: 6830 - DNA, 23 bp, Artificial Sequence
  human ApoB siRNA sequence
atgatttacatgatttgaaaata

SEQ ID NO: 6831 - DNA, 23 bp, Artificial Sequence
  human ApoB siRNA sequence
tgatttacatgatttgaaaatag

SEQ ID NO: 6832 - DNA, 23 bp, Artificial Sequence
  human ApoB siRNA sequence
gatttacatgatttgaaaatagc

SEQ ID NO: 6833 - DNA, 23 bp, Artificial Sequence
  human ApoB siRNA sequence
atttacatgatttgaaaatagct

SEQ ID NO: 6834 - DNA, 23 bp, Artificial Sequence
  human ApoB siRNA sequence
tttacatgatttgaaaatagcta

SEQ ID NO: 6835 - DNA, 23 bp, Artificial Sequence
  human ApoB siRNA sequence
ttacatgatttgaaaatagctat

SEQ ID NO: 6836 - DNA, 23 bp, Artificial Sequence
  human ApoB siRNA sequence
tacatgatttgaaaatagctatt

SEQ ID NO: 6837 - DNA, 23 bp, Artificial Sequence
  human ApoB siRNA sequence
acatgatttgaaaatagctattg

SEQ ID NO: 6838 - DNA, 23 bp, Artificial Sequence
  human ApoB siRNA sequence
catgatttgaaaatagctattgc

SEQ ID NO: 6839 - DNA, 23 bp, Artificial Sequence
  human ApoB siRNA sequence
atgatttgaaaatagctattgct

SEQ ID NO: 6840 - DNA, 23 bp, Artificial Sequence
  human ApoB siRNA sequence
tgatttgaaaatagctattgcta

SEQ ID NO: 6841 - DNA, 23 bp, Artificial Sequence
  human ApoB siRNA sequence
gatttgaaaatagctattgctaa

SEQ ID NO: 6842 - DNA, 23 bp, Artificial Sequence
  human ApoB siRNA sequence
atttgaaaatagctattgctaat

SEQ ID NO: 6843 - DNA, 23 bp, Artificial Sequence
  human ApoB siRNA sequence
tttgaaaatagctattgctaata

SEQ ID NO: 6844 - DNA, 23 bp, Artificial Sequence
  human ApoB siRNA sequence
ttgaaaatagctattgctaatat

SEQ ID NO: 6845 - DNA, 23 bp, Artificial Sequence
  human ApoB siRNA sequence
tgaaaatagctattgctaatatt

SEQ ID NO: 6846 - DNA, 23 bp, Artificial Sequence
  human ApoB siRNA sequence
gaaaatagctattgctaatatta

SEQ ID NO: 6847 - DNA, 23 bp, Artificial Sequence
  human ApoB siRNA sequence
aaaatagctattgctaatattat

SEQ ID NO: 6848 - DNA, 23 bp, Artificial Sequence
  human ApoB siRNA sequence
aaatagctattgctaatattatt

SEQ ID NO: 6849 - DNA, 23 bp, Artificial Sequence
  human ApoB siRNA sequence
aatagctattgctaatattattg

SEQ ID NO: 6850 - DNA, 23 bp, Artificial Sequence
  human ApoB siRNA sequence
atagctattgctaatattattga

SEQ ID NO: 6851 - DNA, 23 bp, Artificial Sequence
  human ApoB siRNA sequence
tagctattgctaatattattgat

SEQ ID NO: 6852 - DNA, 23 bp, Artificial Sequence
  human ApoB siRNA sequence
agctattgctaatattattgatg

SEQ ID NO: 6853 - DNA, 23 bp, Artificial Sequence
  human ApoB siRNA sequence
gctattgctaatattattgatga

SEQ ID NO: 6854 - DNA, 23 bp, Artificial Sequence
  human ApoB siRNA sequence
ctattgctaatattattgatgaa

SEQ ID NO: 6855 - DNA, 23 bp, Artificial Sequence
  human ApoB siRNA sequence
tattgctaatattattgatgaaa

SEQ ID NO: 6856 - DNA, 23 bp, Artificial Sequence
  human ApoB siRNA sequence
attgctaatattattgatgaaat

SEQ ID NO: 6857 - DNA, 23 bp, Artificial Sequence
  human ApoB siRNA sequence
ttgctaatattattgatgaaatc

SEQ ID NO: 6858 - DNA, 23 bp, Artificial Sequence
  human ApoB siRNA sequence
tgctaatattattgatgaaatca

SEQ ID NO: 6859 - DNA, 23 bp, Artificial Sequence
  human ApoB siRNA sequence
gctaatattattgatgaaatcat

SEQ ID NO: 6860 - DNA, 23 bp, Artificial Sequence
  human ApoB siRNA sequence
ctaatattattgatgaaatcatt

SEQ ID NO: 6861 - DNA, 23 bp, Artificial Sequence
  human ApoB siRNA sequence
taatattattgatgaaatcattg

SEQ ID NO: 6862 - DNA, 23 bp, Artificial Sequence
  human ApoB siRNA sequence
aatattattgatgaaatcattga

SEQ ID NO: 6863 - DNA, 23 bp, Artificial Sequence
  human ApoB siRNA sequence
atattattgatgaaatcattgaa

SEQ ID NO: 6864 - DNA, 23 bp, Artificial Sequence
  human ApoB siRNA sequence
tattattgatgaaatcattgaaa

SEQ ID NO: 6865 - DNA, 23 bp, Artificial Sequence
  human ApoB siRNA sequence
attattgatgaaatcattgaaaa

SEQ ID NO: 6866 - DNA, 23 bp, Artificial Sequence
  human ApoB siRNA sequence
ttattgatgaaatcattgaaaaa

SEQ ID NO: 6867 - DNA, 23 bp, Artificial Sequence
  human ApoB siRNA sequence
tattgatgaaatcattgaaaaat

SEQ ID NO: 6868 - DNA, 23 bp, Artificial Sequence
  human ApoB siRNA sequence
attgatgaaatcattgaaaaatt

SEQ ID NO: 6869 - DNA, 23 bp, Artificial Sequence
  human ApoB siRNA sequence
ttgatgaaatcattgaaaaatta

SEQ ID NO: 6870 - DNA, 23 bp, Artificial Sequence
  human ApoB siRNA sequence
tgatgaaatcattgaaaaattaa

SEQ ID NO: 6871 - DNA, 23 bp, Artificial Sequence
  human ApoB siRNA sequence
gatgaaatcattgaaaaattaaa

SEQ ID NO: 6872 - DNA, 23 bp, Artificial Sequence
  human ApoB siRNA sequence
atgaaatcattgaaaaattaaaa

SEQ ID NO: 6873 - DNA, 23 bp, Artificial Sequence
  human ApoB siRNA sequence
tgaaatcattgaaaaattaaaaa

SEQ ID NO: 6874 - DNA, 23 bp, Artificial Sequence
  human ApoB siRNA sequence
gaaatcattgaaaaattaaaaag

SEQ ID NO: 6875 - DNA, 23 bp, Artificial Sequence
  human ApoB siRNA sequence
aaatcattgaaaaattaaaaagt

SEQ ID NO: 6876 - DNA, 23 bp, Artificial Sequence
  human ApoB siRNA sequence
aatcattgaaaaattaaaaagtc

SEQ ID NO: 6877 - DNA, 23 bp, Artificial Sequence
  human ApoB siRNA sequence
atcattgaaaaattaaaaagtct

SEQ ID NO: 6878 - DNA, 23 bp, Artificial Sequence
  human ApoB siRNA sequence
tcattgaaaaattaaaaagtctt

SEQ ID NO: 6879 - DNA, 23 bp, Artificial Sequence
  human ApoB siRNA sequence
cattgaaaaattaaaaagtcttg

SEQ ID NO: 6880 - DNA, 23 bp, Artificial Sequence
  human ApoB siRNA sequence
attgaaaaattaaaaagtcttga

SEQ ID NO: 6881 - DNA, 23 bp, Artificial Sequence
  human ApoB siRNA sequence
ttgaaaaattaaaaagtcttgat

SEQ ID NO: 6882 - DNA, 23 bp, Artificial Sequence
  human ApoB siRNA sequence
tgaaaaattaaaaagtcttgatg

SEQ ID NO: 6883 - DNA, 23 bp, Artificial Sequence
  human ApoB siRNA sequence
gaaaaattaaaaagtcttgatga

SEQ ID NO: 6884 - DNA, 23 bp, Artificial Sequence
  human ApoB siRNA sequence
aaaaattaaaaagtcttgatgag

SEQ ID NO: 6885 - DNA, 23 bp, Artificial Sequence
  human ApoB siRNA sequence
aaaattaaaaagtcttgatgagc

SEQ ID NO: 6886 - DNA, 23 bp, Artificial Sequence
  human ApoB siRNA sequence
aaattaaaaagtcttgatgagca

SEQ ID NO: 6887 - DNA, 23 bp, Artificial Sequence
  human ApoB siRNA sequence
aattaaaaagtcttgatgagcac

SEQ ID NO: 6888 - DNA, 23 bp, Artificial Sequence
  human ApoB siRNA sequence
attaaaaagtcttgatgagcact

SEQ ID NO: 6889 - DNA, 23 bp, Artificial Sequence
  human ApoB siRNA sequence
ttaaaaagtcttgatgagcacta

SEQ ID NO: 6890 - DNA, 23 bp, Artificial Sequence
  human ApoB siRNA sequence
taaaaagtcttgatgagcactat

SEQ ID NO: 6891 - DNA, 23 bp, Artificial Sequence
  human ApoB siRNA sequence
aaaaagtcttgatgagcactatc

SEQ ID NO: 6892 - DNA, 23 bp, Artificial Sequence
  human ApoB siRNA sequence
aaaagtcttgatgagcactatca

SEQ ID NO: 6893 - DNA, 23 bp, Artificial Sequence
  human ApoB siRNA sequence
aaagtcttgatgagcactatcat

SEQ ID NO: 6894 - DNA, 23 bp, Artificial Sequence
  human ApoB siRNA sequence
aagtcttgatgagcactatcata

SEQ ID NO: 6895 - DNA, 23 bp, Artificial Sequence
  human ApoB siRNA sequence
agtcttgatgagcactatcatat

SEQ ID NO: 6896 - DNA, 23 bp, Artificial Sequence
  human ApoB siRNA sequence
gtcttgatgagcactatcatatc

SEQ ID NO: 6897 - DNA, 23 bp, Artificial Sequence
  human ApoB siRNA sequence
tcttgatgagcactatcatatcc

SEQ ID NO: 6898 - DNA, 23 bp, Artificial Sequence
  human ApoB siRNA sequence
cttgatgagcactatcatatccg

SEQ ID NO: 6899 - DNA, 23 bp, Artificial Sequence
  human ApoB siRNA sequence
ttgatgagcactatcatatccgt

SEQ ID NO: 6900 - DNA, 23 bp, Artificial Sequence
  human ApoB siRNA sequence
tgatgagcactatcatatccgtg

SEQ ID NO: 6901 - DNA, 23 bp, Artificial Sequence
  human ApoB siRNA sequence
gatgagcactatcatatccgtgt

SEQ ID NO: 6902 - DNA, 23 bp, Artificial Sequence
  human ApoB siRNA sequence
atgagcactatcatatccgtgta

SEQ ID NO: 6903 - DNA, 23 bp, Artificial Sequence
  human ApoB siRNA sequence
tgagcactatcatatccgtgtaa

SEQ ID NO: 6904 - DNA, 23 bp, Artificial Sequence
  human ApoB siRNA sequence
gagcactatcatatccgtgtaaa

SEQ ID NO: 6905 - DNA, 23 bp, Artificial Sequence
  human ApoB siRNA sequence
agcactatcatatccgtgtaaat

SEQ ID NO: 6906 - DNA, 23 bp, Artificial Sequence
  human ApoB siRNA sequence
gcactatcatatccgtgtaaatt

SEQ ID NO: 6907 - DNA, 23 bp, Artificial Sequence
  human ApoB siRNA sequence
cactatcatatccgtgtaaattt

SEQ ID NO: 6908 - DNA, 23 bp, Artificial Sequence
  human ApoB siRNA sequence
actatcatatccgtgtaaattta

SEQ ID NO: 6909 - DNA, 23 bp, Artificial Sequence
  human ApoB siRNA sequence
ctatcatatccgtgtaaatttag

SEQ ID NO: 6910 - DNA, 23 bp, Artificial Sequence
  human ApoB siRNA sequence
tatcatatccgtgtaaatttagt

SEQ ID NO: 6911 - DNA, 23 bp, Artificial Sequence
  human ApoB siRNA sequence
atcatatccgtgtaaatttagta

SEQ ID NO: 6912 - DNA, 23 bp, Artificial Sequence
  human ApoB siRNA sequence
tcatatccgtgtaaatttagtaa

SEQ ID NO: 6913 - DNA, 23 bp, Artificial Sequence
  human ApoB siRNA sequence
catatccgtgtaaatttagtaaa

SEQ ID NO: 6914 - DNA, 23 bp, Artificial Sequence
  human ApoB siRNA sequence
atatccgtgtaaatttagtaaaa

SEQ ID NO: 6915 - DNA, 23 bp, Artificial Sequence
  human ApoB siRNA sequence
tatccgtgtaaatttagtaaaaa

SEQ ID NO: 6916 - DNA, 23 bp, Artificial Sequence
  human ApoB siRNA sequence
atccgtgtaaatttagtaaaaac

SEQ ID NO: 6917 - DNA, 23 bp, Artificial Sequence
  human ApoB siRNA sequence
tccgtgtaaatttagtaaaaaca

SEQ ID NO: 6918 - DNA, 23 bp, Artificial Sequence
  human ApoB siRNA sequence
ccgtgtaaatttagtaaaaacaa

SEQ ID NO: 6919 - DNA, 23 bp, Artificial Sequence
  human ApoB siRNA sequence
cgtgtaaatttagtaaaaacaat

SEQ ID NO: 6920 - DNA, 23 bp, Artificial Sequence
  human ApoB siRNA sequence
gtgtaaatttagtaaaaacaatc

SEQ ID NO: 6921 - DNA, 23 bp, Artificial Sequence
  human ApoB siRNA sequence
tgtaaatttagtaaaaacaatcc

SEQ ID NO: 6922 - DNA, 23 bp, Artificial Sequence
  human ApoB siRNA sequence
gtaaatttagtaaaaacaatcca

SEQ ID NO: 6923 - DNA, 23 bp, Artificial Sequence
  human ApoB siRNA sequence
taaatttagtaaaaacaatccat

SEQ ID NO: 6924 - DNA, 23 bp, Artificial Sequence
  human ApoB siRNA sequence
aaatttagtaaaaacaatccatg

SEQ ID NO: 6925 - DNA, 23 bp, Artificial Sequence
  human ApoB siRNA sequence
aatttagtaaaaacaatccatga

SEQ ID NO: 6926 - DNA, 23 bp, Artificial Sequence
  human ApoB siRNA sequence
atttagtaaaaacaatccatgat

SEQ ID NO: 6927 - DNA, 23 bp, Artificial Sequence
  human ApoB siRNA sequence
tttagtaaaaacaatccatgatc

SEQ ID NO: 6928 - DNA, 23 bp, Artificial Sequence
  human ApoB siRNA sequence
ttagtaaaaacaatccatgatct

SEQ ID NO: 6929 - DNA, 23 bp, Artificial Sequence
  human ApoB siRNA sequence
tagtaaaaacaatccatgatcta

SEQ ID NO: 6930 - DNA, 23 bp, Artificial Sequence
  human ApoB siRNA sequence
agtaaaaacaatccatgatctac

SEQ ID NO: 6931 - DNA, 23 bp, Artificial Sequence
  human ApoB siRNA sequence
gtaaaaacaatccatgatctaca

SEQ ID NO: 6932 - DNA, 23 bp, Artificial Sequence
  human ApoB siRNA sequence
taaaaacaatccatgatctacat

SEQ ID NO: 6933 - DNA, 23 bp, Artificial Sequence
  human ApoB siRNA sequence
aaaaacaatccatgatctacatt

SEQ ID NO: 6934 - DNA, 23 bp, Artificial Sequence
  human ApoB siRNA sequence
aaaacaatccatgatctacattt

SEQ ID NO: 6935 - DNA, 23 bp, Artificial Sequence
  human ApoB siRNA sequence
aaacaatccatgatctacatttg

SEQ ID NO: 6936 - DNA, 23 bp, Artificial Sequence
  human ApoB siRNA sequence
aacaatccatgatctacatttgt

SEQ ID NO: 6937 - DNA, 23 bp, Artificial Sequence
  human ApoB siRNA sequence
acaatccatgatctacatttgtt

SEQ ID NO: 6938 - DNA, 23 bp, Artificial Sequence
  human ApoB siRNA sequence
caatccatgatctacatttgttt

SEQ ID NO: 6939 - DNA, 23 bp, Artificial Sequence
  human ApoB siRNA sequence
aatccatgatctacatttgttta

SEQ ID NO: 6940 - DNA, 23 bp, Artificial Sequence
  human ApoB siRNA sequence
atccatgatctacatttgtttat

SEQ ID NO: 6941 - DNA, 23 bp, Artificial Sequence
  human ApoB siRNA sequence
tccatgatctacatttgtttatt

SEQ ID NO: 6942 - DNA, 23 bp, Artificial Sequence
  human ApoB siRNA sequence
ccatgatctacatttgtttattg

SEQ ID NO: 6943 - DNA, 23 bp, Artificial Sequence
  human ApoB siRNA sequence
catgatctacatttgtttattga

SEQ ID NO: 6944 - DNA, 23 bp, Artificial Sequence
  human ApoB siRNA sequence
atgatctacatttgtttattgaa

SEQ ID NO: 6945 - DNA, 23 bp, Artificial Sequence
  human ApoB siRNA sequence
tgatctacatttgtttattgaaa

SEQ ID NO: 6946 - DNA, 23 bp, Artificial Sequence
  human ApoB siRNA sequence
gatctacatttgtttattgaaaa

SEQ ID NO: 6947 - DNA, 23 bp, Artificial Sequence
  human ApoB siRNA sequence
atctacatttgtttattgaaaat

SEQ ID NO: 6948 - DNA, 23 bp, Artificial Sequence
  human ApoB siRNA sequence
tctacatttgtttattgaaaata

SEQ ID NO: 6949 - DNA, 23 bp, Artificial Sequence
  human ApoB siRNA sequence
ctacatttgtttattgaaaatat

SEQ ID NO: 6950 - DNA, 23 bp, Artificial Sequence
  human ApoB siRNA sequence
tacatttgtttattgaaaatatt

SEQ ID NO: 6951 - DNA, 23 bp, Artificial Sequence
  human ApoB siRNA sequence
acatttgtttattgaaaatattg

SEQ ID NO: 6952 - DNA, 23 bp, Artificial Sequence
  human ApoB siRNA sequence
catttgtttattgaaaatattga

SEQ ID NO: 6953 - DNA, 23 bp, Artificial Sequence
  human ApoB siRNA sequence
atttgtttattgaaaatattgat

SEQ ID NO: 6954 - DNA, 23 bp, Artificial Sequence
  human ApoB siRNA sequence
tttgtttattgaaaatattgatt

SEQ ID NO: 6955 - DNA, 23 bp, Artificial Sequence
  human ApoB siRNA sequence
ttgtttattgaaaatattgattt

SEQ ID NO: 6956 - DNA, 23 bp, Artificial Sequence
  human ApoB siRNA sequence
tgtttattgaaaatattgatttt

SEQ ID NO: 6957 - DNA, 23 bp, Artificial Sequence
  human ApoB siRNA sequence
gtttattgaaaatattgatttta

SEQ ID NO: 6958 - DNA, 23 bp, Artificial Sequence
  human ApoB siRNA sequence
tttattgaaaatattgattttaa

SEQ ID NO: 6959 - DNA, 23 bp, Artificial Sequence
  human ApoB siRNA sequence
ttattgaaaatattgattttaac

SEQ ID NO: 6960 - DNA, 23 bp, Artificial Sequence
  human ApoB siRNA sequence
tattgaaaatattgattttaaca

SEQ ID NO: 6961 - DNA, 23 bp, Artificial Sequence
  human ApoB siRNA sequence
attgaaaatattgattttaacaa

SEQ ID NO: 6962 - DNA, 23 bp, Artificial Sequence
  human ApoB siRNA sequence
ttgaaaatattgattttaacaaa

SEQ ID NO: 6963 - DNA, 23 bp, Artificial Sequence
  human ApoB siRNA sequence
tgaaaatattgattttaacaaaa

SEQ ID NO: 6964 - DNA, 23 bp, Artificial Sequence
  human ApoB siRNA sequence
gaaaatattgattttaacaaaag

SEQ ID NO: 6965 - DNA, 23 bp, Artificial Sequence
  human ApoB siRNA sequence
aaaatattgattttaacaaaagt

SEQ ID NO: 6966 - DNA, 23 bp, Artificial Sequence
  human ApoB siRNA sequence
aaatattgattttaacaaaagtg

SEQ ID NO: 6967 - DNA, 23 bp, Artificial Sequence
  human ApoB siRNA sequence
aatattgattttaacaaaagtgg

SEQ ID NO: 6968 - DNA, 23 bp, Artificial Sequence
  human ApoB siRNA sequence
atattgattttaacaaaagtgga

SEQ ID NO: 6969 - DNA, 23 bp, Artificial Sequence
  human ApoB siRNA sequence
tattgattttaacaaaagtggaa

SEQ ID NO: 6970 - DNA, 23 bp, Artificial Sequence
  human ApoB siRNA sequence
attgattttaacaaaagtggaag

SEQ ID NO: 6971 - DNA, 23 bp, Artificial Sequence
  human ApoB siRNA sequence
ttgattttaacaaaagtggaagt

SEQ ID NO: 6972 - DNA, 23 bp, Artificial Sequence
  human ApoB siRNA sequence
tgattttaacaaaagtggaagta

SEQ ID NO: 6973 - DNA, 23 bp, Artificial Sequence
  human ApoB siRNA sequence
gattttaacaaaagtggaagtag

SEQ ID NO: 6974 - DNA, 23 bp, Artificial Sequence
  human ApoB siRNA sequence
attttaacaaaagtggaagtagt

SEQ ID NO: 6975 - DNA, 23 bp, Artificial Sequence
  human ApoB siRNA sequence
ttttaacaaaagtggaagtagta

SEQ ID NO: 6976 - DNA, 23 bp, Artificial Sequence
  human ApoB siRNA sequence
tttaacaaaagtggaagtagtac

SEQ ID NO: 6977 - DNA, 23 bp, Artificial Sequence
  human ApoB siRNA sequence
ttaacaaaagtggaagtagtact

SEQ ID NO: 6978 - DNA, 23 bp, Artificial Sequence
  human ApoB siRNA sequence
taacaaaagtggaagtagtactg

SEQ ID NO: 6979 - DNA, 23 bp, Artificial Sequence
  human ApoB siRNA sequence
aacaaaagtggaagtagtactgc

SEQ ID NO: 6980 - DNA, 23 bp, Artificial Sequence
  human ApoB siRNA sequence
acaaaagtggaagtagtactgca

SEQ ID NO: 6981 - DNA, 23 bp, Artificial Sequence
  human ApoB siRNA sequence
caaaagtggaagtagtactgcat

SEQ ID NO: 6982 - DNA, 23 bp, Artificial Sequence
  human ApoB siRNA sequence
aaaagtggaagtagtactgcatc

SEQ ID NO: 6983 - DNA, 23 bp, Artificial Sequence
  human ApoB siRNA sequence
aaagtggaagtagtactgcatcc

SEQ ID NO: 6984 - DNA, 23 bp, Artificial Sequence
  human ApoB siRNA sequence
aagtggaagtagtactgcatcct

SEQ ID NO: 6985 - DNA, 23 bp, Artificial Sequence
  human ApoB siRNA sequence
agtggaagtagtactgcatcctg

SEQ ID NO: 6986 - DNA, 23 bp, Artificial Sequence
  human ApoB siRNA sequence
gtggaagtagtactgcatcctgg

SEQ ID NO: 6987 - DNA, 23 bp, Artificial Sequence
  human ApoB siRNA sequence
tggaagtagtactgcatcctgga

SEQ ID NO: 6988 - DNA, 23 bp, Artificial Sequence
  human ApoB siRNA sequence
ggaagtagtactgcatcctggat

SEQ ID NO: 6989 - DNA, 23 bp, Artificial Sequence
  human ApoB siRNA sequence
gaagtagtactgcatcctggatt

SEQ ID NO: 6990 - DNA, 23 bp, Artificial Sequence
  human ApoB siRNA sequence
aagtagtactgcatcctggattc

SEQ ID NO: 6991 - DNA, 23 bp, Artificial Sequence
  human ApoB siRNA sequence
agtagtactgcatcctggattca

SEQ ID NO: 6992 - DNA, 23 bp, Artificial Sequence
  human ApoB siRNA sequence
gtagtactgcatcctggattcaa

SEQ ID NO: 6993 - DNA, 23 bp, Artificial Sequence
  human ApoB siRNA sequence
tagtactgcatcctggattcaaa

SEQ ID NO: 6994 - DNA, 23 bp, Artificial Sequence
  human ApoB siRNA sequence
agtactgcatcctggattcaaaa

SEQ ID NO: 6995 - DNA, 23 bp, Artificial Sequence
  human ApoB siRNA sequence
gtactgcatcctggattcaaaat

SEQ ID NO: 6996 - DNA, 23 bp, Artificial Sequence
  human ApoB siRNA sequence
tactgcatcctggattcaaaatg

SEQ ID NO: 6997 - DNA, 23 bp, Artificial Sequence
  human ApoB siRNA sequence
actgcatcctggattcaaaatgt

SEQ ID NO: 6998 - DNA, 23 bp, Artificial Sequence
  human ApoB siRNA sequence
ctgcatcctggattcaaaatgtg

SEQ ID NO: 6999 - DNA, 23 bp, Artificial Sequence
  human ApoB siRNA sequence
tgcatcctggattcaaaatgtgg

SEQ ID NO: 7000 - DNA, 23 bp, Artificial Sequence
  human ApoB siRNA sequence
gcatcctggattcaaaatgtgga

SEQ ID NO: 7001 - DNA, 23 bp, Artificial Sequence
  human ApoB siRNA sequence
catcctggattcaaaatgtggat

SEQ ID NO: 7002 - DNA, 23 bp, Artificial Sequence
  human ApoB siRNA sequence
atcctggattcaaaatgtggata

SEQ ID NO: 7003 - DNA, 23 bp, Artificial Sequence
  human ApoB siRNA sequence
tcctggattcaaaatgtggatac

SEQ ID NO: 7004 - DNA, 23 bp, Artificial Sequence
  human ApoB siRNA sequence
cctggattcaaaatgtggatact

SEQ ID NO: 7005 - DNA, 23 bp, Artificial Sequence
  human ApoB siRNA sequence
ctggattcaaaatgtggatacta

SEQ ID NO: 7006 - DNA, 23 bp, Artificial Sequence
  human ApoB siRNA sequence
tggattcaaaatgtggatactaa

SEQ ID NO: 7007 - DNA, 23 bp, Artificial Sequence
  human ApoB siRNA sequence
ggattcaaaatgtggatactaag

SEQ ID NO: 7008 - DNA, 23 bp, Artificial Sequence
  human ApoB siRNA sequence
gattcaaaatgtggatactaagt

SEQ ID NO: 7009 - DNA, 23 bp, Artificial Sequence
  human ApoB siRNA sequence
attcaaaatgtggatactaagta

SEQ ID NO: 7010 - DNA, 23 bp, Artificial Sequence
  human ApoB siRNA sequence
ttcaaaatgtggatactaagtac

SEQ ID NO: 7011 - DNA, 23 bp, Artificial Sequence
  human ApoB siRNA sequence
tcaaaatgtggatactaagtacc

SEQ ID NO: 7012 - DNA, 23 bp, Artificial Sequence
  human ApoB siRNA sequence
caaaatgtggatactaagtacca

SEQ ID NO: 7013 - DNA, 23 bp, Artificial Sequence
  human ApoB siRNA sequence
aaaatgtggatactaagtaccaa

SEQ ID NO: 7014 - DNA, 23 bp, Artificial Sequence
  human ApoB siRNA sequence
aaatgtggatactaagtaccaaa

SEQ ID NO: 7015 - DNA, 23 bp, Artificial Sequence
  human ApoB siRNA sequence
aatgtggatactaagtaccaaat

SEQ ID NO: 7016 - DNA, 23 bp, Artificial Sequence
  human ApoB siRNA sequence
atgtggatactaagtaccaaatc

SEQ ID NO: 7017 - DNA, 23 bp, Artificial Sequence
  human ApoB siRNA sequence
tgtggatactaagtaccaaatca

SEQ ID NO: 7018 - DNA, 23 bp, Artificial Sequence
  human ApoB siRNA sequence
gtggatactaagtaccaaatcag

SEQ ID NO: 7019 - DNA, 23 bp, Artificial Sequence
  human ApoB siRNA sequence
tggatactaagtaccaaatcaga

SEQ ID NO: 7020 - DNA, 23 bp, Artificial Sequence
  human ApoB siRNA sequence
ggatactaagtaccaaatcagaa

SEQ ID NO: 7021 - DNA, 23 bp, Artificial Sequence
  human ApoB siRNA sequence
gatactaagtaccaaatcagaat

SEQ ID NO: 7022 - DNA, 23 bp, Artificial Sequence
  human ApoB siRNA sequence
atactaagtaccaaatcagaatc

SEQ ID NO: 7023 - DNA, 23 bp, Artificial Sequence
  human ApoB siRNA sequence
tactaagtaccaaatcagaatcc

SEQ ID NO: 7024 - DNA, 23 bp, Artificial Sequence
  human ApoB siRNA sequence
actaagtaccaaatcagaatcca

SEQ ID NO: 7025 - DNA, 23 bp, Artificial Sequence
  human ApoB siRNA sequence
ctaagtaccaaatcagaatccag

SEQ ID NO: 7026 - DNA, 23 bp, Artificial Sequence
  human ApoB siRNA sequence
taagtaccaaatcagaatccaga

SEQ ID NO: 7027 - DNA, 23 bp, Artificial Sequence
  human ApoB siRNA sequence
aagtaccaaatcagaatccagat

SEQ ID NO: 7028 - DNA, 23 bp, Artificial Sequence
  human ApoB siRNA sequence
agtaccaaatcagaatccagata

SEQ ID NO: 7029 - DNA, 23 bp, Artificial Sequence
  human ApoB siRNA sequence
gtaccaaatcagaatccagatac

SEQ ID NO: 7030 - DNA, 23 bp, Artificial Sequence
  human ApoB siRNA sequence
taccaaatcagaatccagataca

SEQ ID NO: 7031 - DNA, 23 bp, Artificial Sequence
  human ApoB siRNA sequence
accaaatcagaatccagatacaa

SEQ ID NO: 7032 - DNA, 23 bp, Artificial Sequence
  human ApoB siRNA sequence
ccaaatcagaatccagatacaag

SEQ ID NO: 7033 - DNA, 23 bp, Artificial Sequence
  human ApoB siRNA sequence
caaatcagaatccagatacaaga

SEQ ID NO: 7034 - DNA, 23 bp, Artificial Sequence
  human ApoB siRNA sequence
aaatcagaatccagatacaagaa

SEQ ID NO: 7035 - DNA, 23 bp, Artificial Sequence
  human ApoB siRNA sequence
aatcagaatccagatacaagaaa

SEQ ID NO: 7036 - DNA, 23 bp, Artificial Sequence
  human ApoB siRNA sequence
atcagaatccagatacaagaaaa

SEQ ID NO: 7037 - DNA, 23 bp, Artificial Sequence
  human ApoB siRNA sequence
tcagaatccagatacaagaaaaa

SEQ ID NO: 7038 - DNA, 23 bp, Artificial Sequence
  human ApoB siRNA sequence
cagaatccagatacaagaaaaac

SEQ ID NO: 7039 - DNA, 23 bp, Artificial Sequence
  human ApoB siRNA sequence
agaatccagatacaagaaaaact

SEQ ID NO: 7040 - DNA, 23 bp, Artificial Sequence
  human ApoB siRNA sequence
gaatccagatacaagaaaaactg

SEQ ID NO: 7041 - DNA, 23 bp, Artificial Sequence
  human ApoB siRNA sequence
aatccagatacaagaaaaactgc

SEQ ID NO: 7042 - DNA, 23 bp, Artificial Sequence
  human ApoB siRNA sequence
atccagatacaagaaaaactgca

SEQ ID NO: 7043 - DNA, 23 bp, Artificial Sequence
  human ApoB siRNA sequence
tccagatacaagaaaaactgcag

SEQ ID NO: 7044 - DNA, 23 bp, Artificial Sequence
  human ApoB siRNA sequence
ccagatacaagaaaaactgcagc

SEQ ID NO: 7045 - DNA, 23 bp, Artificial Sequence
  human ApoB siRNA sequence
cagatacaagaaaaactgcagca

SEQ ID NO: 7046 - DNA, 23 bp, Artificial Sequence
  human ApoB siRNA sequence
agatacaagaaaaactgcagcag

SEQ ID NO: 7047 - DNA, 23 bp, Artificial Sequence
  human ApoB siRNA sequence
gatacaagaaaaactgcagcagc

SEQ ID NO: 7048 - DNA, 23 bp, Artificial Sequence
  human ApoB siRNA sequence
atacaagaaaaactgcagcagct

SEQ ID NO: 7049 - DNA, 23 bp, Artificial Sequence
  human ApoB siRNA sequence
tacaagaaaaactgcagcagctt

SEQ ID NO: 7050 - DNA, 23 bp, Artificial Sequence
  human ApoB siRNA sequence
acaagaaaaactgcagcagctta

SEQ ID NO: 7051 - DNA, 23 bp, Artificial Sequence
  human ApoB siRNA sequence
caagaaaaactgcagcagcttaa

SEQ ID NO: 7052 - DNA, 23 bp, Artificial Sequence
  human ApoB siRNA sequence
aagaaaaactgcagcagcttaag

SEQ ID NO: 7053 - DNA, 23 bp, Artificial Sequence
  human ApoB siRNA sequence
agaaaaactgcagcagcttaaga

SEQ ID NO: 7054 - DNA, 23 bp, Artificial Sequence
  human ApoB siRNA sequence
gaaaaactgcagcagcttaagag

SEQ ID NO: 7055 - DNA, 23 bp, Artificial Sequence
  human ApoB siRNA sequence
aaaaactgcagcagcttaagaga

SEQ ID NO: 7056 - DNA, 23 bp, Artificial Sequence
  human ApoB siRNA sequence
aaaactgcagcagcttaagagac

SEQ ID NO: 7057 - DNA, 23 bp, Artificial Sequence
  human ApoB siRNA sequence
aaactgcagcagcttaagagaca

SEQ ID NO: 7058 - DNA, 23 bp, Artificial Sequence
  human ApoB siRNA sequence
aactgcagcagcttaagagacac

SEQ ID NO: 7059 - DNA, 23 bp, Artificial Sequence
  human ApoB siRNA sequence
actgcagcagcttaagagacaca

SEQ ID NO: 7060 - DNA, 23 bp, Artificial Sequence
  human ApoB siRNA sequence
ctgcagcagcttaagagacacat

SEQ ID NO: 7061 - DNA, 23 bp, Artificial Sequence
  human ApoB siRNA sequence
tgcagcagcttaagagacacata

SEQ ID NO: 7062 - DNA, 23 bp, Artificial Sequence
  human ApoB siRNA sequence
gcagcagcttaagagacacatac

SEQ ID NO: 7063 - DNA, 23 bp, Artificial Sequence
  human ApoB siRNA sequence
cagcagcttaagagacacataca

SEQ ID NO: 7064 - DNA, 23 bp, Artificial Sequence
  human ApoB siRNA sequence
agcagcttaagagacacatacag

SEQ ID NO: 7065 - DNA, 23 bp, Artificial Sequence
  human ApoB siRNA sequence
gcagcttaagagacacatacaga

SEQ ID NO: 7066 - DNA, 23 bp, Artificial Sequence
  human ApoB siRNA sequence
cagcttaagagacacatacagaa

SEQ ID NO: 7067 - DNA, 23 bp, Artificial Sequence
  human ApoB siRNA sequence
agcttaagagacacatacagaat

SEQ ID NO: 7068 - DNA, 23 bp, Artificial Sequence
  human ApoB siRNA sequence
gcttaagagacacatacagaata

SEQ ID NO: 7069 - DNA, 23 bp, Artificial Sequence
  human ApoB siRNA sequence
cttaagagacacatacagaatat

SEQ ID NO: 7070 - DNA, 23 bp, Artificial Sequence
  human ApoB siRNA sequence
ttaagagacacatacagaatata

SEQ ID NO: 7071 - DNA, 23 bp, Artificial Sequence
  human ApoB siRNA sequence
taagagacacatacagaatatag

SEQ ID NO: 7072 - DNA, 23 bp, Artificial Sequence
  human ApoB siRNA sequence
aagagacacatacagaatataga

SEQ ID NO: 7073 - DNA, 23 bp, Artificial Sequence
  human ApoB siRNA sequence
agagacacatacagaatatagac

SEQ ID NO: 7074 - DNA, 23 bp, Artificial Sequence
  human ApoB siRNA sequence
gagacacatacagaatatagaca

SEQ ID NO: 7075 - DNA, 23 bp, Artificial Sequence
  human ApoB siRNA sequence
agacacatacagaatatagacat

SEQ ID NO: 7076 - DNA, 23 bp, Artificial Sequence
  human ApoB siRNA sequence
gacacatacagaatatagacatc

SEQ ID NO: 7077 - DNA, 23 bp, Artificial Sequence
  human ApoB siRNA sequence
acacatacagaatatagacatcc

SEQ ID NO: 7078 - DNA, 23 bp, Artificial Sequence
  human ApoB siRNA sequence
cacatacagaatatagacatcca

SEQ ID NO: 7079 - DNA, 23 bp, Artificial Sequence
  human ApoB siRNA sequence
acatacagaatatagacatccag

SEQ ID NO: 7080 - DNA, 23 bp, Artificial Sequence
  human ApoB siRNA sequence
catacagaatatagacatccagc

SEQ ID NO: 7081 - DNA, 23 bp, Artificial Sequence
  human ApoB siRNA sequence
atacagaatatagacatccagca

SEQ ID NO: 7082 - DNA, 23 bp, Artificial Sequence
  human ApoB siRNA sequence
tacagaatatagacatccagcac

SEQ ID NO: 7083 - DNA, 23 bp, Artificial Sequence
  human ApoB siRNA sequence
acagaatatagacatccagcacc

SEQ ID NO: 7084 - DNA, 23 bp, Artificial Sequence
  human ApoB siRNA sequence
cagaatatagacatccagcacct

SEQ ID NO: 7085 - DNA, 23 bp, Artificial Sequence
  human ApoB siRNA sequence
agaatatagacatccagcaccta

SEQ ID NO: 7086 - DNA, 23 bp, Artificial Sequence
  human ApoB siRNA sequence
gaatatagacatccagcacctag

SEQ ID NO: 7087 - DNA, 23 bp, Artificial Sequence
  human ApoB siRNA sequence
aatatagacatccagcacctagc

SEQ ID NO: 7088 - DNA, 23 bp, Artificial Sequence
  human ApoB siRNA sequence
atatagacatccagcacctagct

SEQ ID NO: 7089 - DNA, 23 bp, Artificial Sequence
  human ApoB siRNA sequence
tatagacatccagcacctagctg

SEQ ID NO: 7090 - DNA, 23 bp, Artificial Sequence
  human ApoB siRNA sequence
atagacatccagcacctagctgg

SEQ ID NO: 7091 - DNA, 23 bp, Artificial Sequence
  human ApoB siRNA sequence
tagacatccagcacctagctgga

SEQ ID NO: 7092 - DNA, 23 bp, Artificial Sequence
  human ApoB siRNA sequence
agacatccagcacctagctggaa

SEQ ID NO: 7093 - DNA, 23 bp, Artificial Sequence
  human ApoB siRNA sequence
gacatccagcacctagctggaaa

SEQ ID NO: 7094 - DNA, 23 bp, Artificial Sequence
  human ApoB siRNA sequence
acatccagcacctagctggaaag

SEQ ID NO: 7095 - DNA, 23 bp, Artificial Sequence
  human ApoB siRNA sequence
catccagcacctagctggaaagt

SEQ ID NO: 7096 - DNA, 23 bp, Artificial Sequence
  human ApoB siRNA sequence
atccagcacctagctggaaagtt

SEQ ID NO: 7097 - DNA, 23 bp, Artificial Sequence
  human ApoB siRNA sequence
tccagcacctagctggaaagtta

SEQ ID NO: 7098 - DNA, 23 bp, Artificial Sequence
  human ApoB siRNA sequence
ccagcacctagctggaaagttaa

SEQ ID NO: 7099 - DNA, 23 bp, Artificial Sequence
  human ApoB siRNA sequence
cagcacctagctggaaagttaaa

SEQ ID NO: 7100 - DNA, 23 bp, Artificial Sequence
  human ApoB siRNA sequence
agcacctagctggaaagttaaaa

SEQ ID NO: 7101 - DNA, 23 bp, Artificial Sequence
  human ApoB siRNA sequence
gcacctagctggaaagttaaaac

SEQ ID NO: 7102 - DNA, 23 bp, Artificial Sequence
  human ApoB siRNA sequence
cacctagctggaaagttaaaaca

SEQ ID NO: 7103 - DNA, 23 bp, Artificial Sequence
  human ApoB siRNA sequence
acctagctggaaagttaaaacaa

SEQ ID NO: 7104 - DNA, 23 bp, Artificial Sequence
  human ApoB siRNA sequence
cctagctggaaagttaaaacaac

SEQ ID NO: 7105 - DNA, 23 bp, Artificial Sequence
  human ApoB siRNA sequence
ctagctggaaagttaaaacaaca

SEQ ID NO: 7106 - DNA, 23 bp, Artificial Sequence
  human ApoB siRNA sequence
tagctggaaagttaaaacaacac

SEQ ID NO: 7107 - DNA, 23 bp, Artificial Sequence
  human ApoB siRNA sequence
agctggaaagttaaaacaacaca

SEQ ID NO: 7108 - DNA, 23 bp, Artificial Sequence
  human ApoB siRNA sequence
gctggaaagttaaaacaacacat

SEQ ID NO: 7109 - DNA, 23 bp, Artificial Sequence
  human ApoB siRNA sequence
ctggaaagttaaaacaacacatt

SEQ ID NO: 7110 - DNA, 23 bp, Artificial Sequence
  human ApoB siRNA sequence
tggaaagttaaaacaacacattg

SEQ ID NO: 7111 - DNA, 23 bp, Artificial Sequence
  human ApoB siRNA sequence
ggaaagttaaaacaacacattga

SEQ ID NO: 7112 - DNA, 23 bp, Artificial Sequence
  human ApoB siRNA sequence
gaaagttaaaacaacacattgag

SEQ ID NO: 7113 - DNA, 23 bp, Artificial Sequence
  human ApoB siRNA sequence
aaagttaaaacaacacattgagg

SEQ ID NO: 7114 - DNA, 23 bp, Artificial Sequence
  human ApoB siRNA sequence
aagttaaaacaacacattgaggc

SEQ ID NO: 7115 - DNA, 23 bp, Artificial Sequence
  human ApoB siRNA sequence
agttaaaacaacacattgaggct

SEQ ID NO: 7116 - DNA, 23 bp, Artificial Sequence
  human ApoB siRNA sequence
gttaaaacaacacattgaggcta

SEQ ID NO: 7117 - DNA, 23 bp, Artificial Sequence
  human ApoB siRNA sequence
ttaaaacaacacattgaggctat

SEQ ID NO: 7118 - DNA, 23 bp, Artificial Sequence
  human ApoB siRNA sequence
taaaacaacacattgaggctatt

SEQ ID NO: 7119 - DNA, 23 bp, Artificial Sequence
  human ApoB siRNA sequence
aaaacaacacattgaggctattg

SEQ ID NO: 7120 - DNA, 23 bp, Artificial Sequence
  human ApoB siRNA sequence
aaacaacacattgaggctattga

SEQ ID NO: 7121 - DNA, 23 bp, Artificial Sequence
  human ApoB siRNA sequence
aacaacacattgaggctattgat

SEQ ID NO: 7122 - DNA, 23 bp, Artificial Sequence
  human ApoB siRNA sequence
acaacacattgaggctattgatg

SEQ ID NO: 7123 - DNA, 23 bp, Artificial Sequence
  human ApoB siRNA sequence
caacacattgaggctattgatgt

SEQ ID NO: 7124 - DNA, 23 bp, Artificial Sequence
  human ApoB siRNA sequence
aacacattgaggctattgatgtt

SEQ ID NO: 7125 - DNA, 23 bp, Artificial Sequence
  human ApoB siRNA sequence
acacattgaggctattgatgtta

SEQ ID NO: 7126 - DNA, 23 bp, Artificial Sequence
  human ApoB siRNA sequence
cacattgaggctattgatgttag

SEQ ID NO: 7127 - DNA, 23 bp, Artificial Sequence
  human ApoB siRNA sequence
acattgaggctattgatgttaga

SEQ ID NO: 7128 - DNA, 23 bp, Artificial Sequence
  human ApoB siRNA sequence
cattgaggctattgatgttagag

SEQ ID NO: 7129 - DNA, 23 bp, Artificial Sequence
  human ApoB siRNA sequence
attgaggctattgatgttagagt

SEQ ID NO: 7130 - DNA, 23 bp, Artificial Sequence
  human ApoB siRNA sequence
ttgaggctattgatgttagagtg

SEQ ID NO: 7131 - DNA, 23 bp, Artificial Sequence
  human ApoB siRNA sequence
tgaggctattgatgttagagtgc

SEQ ID NO: 7132 - DNA, 23 bp, Artificial Sequence
  human ApoB siRNA sequence
gaggctattgatgttagagtgct

SEQ ID NO: 7133 - DNA, 23 bp, Artificial Sequence
  human ApoB siRNA sequence
aggctattgatgttagagtgctt

SEQ ID NO: 7134 - DNA, 23 bp, Artificial Sequence
  human ApoB siRNA sequence
ggctattgatgttagagtgcttt

SEQ ID NO: 7135 - DNA, 23 bp, Artificial Sequence
  human ApoB siRNA sequence
gctattgatgttagagtgctttt

SEQ ID NO: 7136 - DNA, 23 bp, Artificial Sequence
  human ApoB siRNA sequence
ctattgatgttagagtgctttta

SEQ ID NO: 7137 - DNA, 23 bp, Artificial Sequence
  human ApoB siRNA sequence
tattgatgttagagtgcttttag

SEQ ID NO: 7138 - DNA, 23 bp, Artificial Sequence
  human ApoB siRNA sequence
attgatgttagagtgcttttaga

SEQ ID NO: 7139 - DNA, 23 bp, Artificial Sequence
  human ApoB siRNA sequence
ttgatgttagagtgcttttagat

SEQ ID NO: 7140 - DNA, 23 bp, Artificial Sequence
  human ApoB siRNA sequence
tgatgttagagtgcttttagatc

SEQ ID NO: 7141 - DNA, 23 bp, Artificial Sequence
  human ApoB siRNA sequence
gatgttagagtgcttttagatca

SEQ ID NO: 7142 - DNA, 23 bp, Artificial Sequence
  human ApoB siRNA sequence
atgttagagtgcttttagatcaa

SEQ ID NO: 7143 - DNA, 23 bp, Artificial Sequence
  human ApoB siRNA sequence
tgttagagtgcttttagatcaat

SEQ ID NO: 7144 - DNA, 23 bp, Artificial Sequence
  human ApoB siRNA sequence
gttagagtgcttttagatcaatt

SEQ ID NO: 7145 - DNA, 23 bp, Artificial Sequence
  human ApoB siRNA sequence
ttagagtgcttttagatcaattg

SEQ ID NO: 7146 - DNA, 23 bp, Artificial Sequence
  human ApoB siRNA sequence
tagagtgcttttagatcaattgg

SEQ ID NO: 7147 - DNA, 23 bp, Artificial Sequence
  human ApoB siRNA sequence
agagtgcttttagatcaattggg

SEQ ID NO: 7148 - DNA, 23 bp, Artificial Sequence
  human ApoB siRNA sequence
gagtgcttttagatcaattggga

SEQ ID NO: 7149 - DNA, 23 bp, Artificial Sequence
  human ApoB siRNA sequence
agtgcttttagatcaattgggaa

SEQ ID NO: 7150 - DNA, 23 bp, Artificial Sequence
  human ApoB siRNA sequence
gtgcttttagatcaattgggaac

SEQ ID NO: 7151 - DNA, 23 bp, Artificial Sequence
  human ApoB siRNA sequence
tgcttttagatcaattgggaact

SEQ ID NO: 7152 - DNA, 23 bp, Artificial Sequence
  human ApoB siRNA sequence
gcttttagatcaattgggaacta

SEQ ID NO: 7153 - DNA, 23 bp, Artificial Sequence
  human ApoB siRNA sequence
cttttagatcaattgggaactac

SEQ ID NO: 7154 - DNA, 23 bp, Artificial Sequence
  human ApoB siRNA sequence
ttttagatcaattgggaactaca

SEQ ID NO: 7155 - DNA, 23 bp, Artificial Sequence
  human ApoB siRNA sequence
tttagatcaattgggaactacaa

SEQ ID NO: 7156 - DNA, 23 bp, Artificial Sequence
  human ApoB siRNA sequence
ttagatcaattgggaactacaat

SEQ ID NO: 7157 - DNA, 23 bp, Artificial Sequence
  human ApoB siRNA sequence
tagatcaattgggaactacaatt

SEQ ID NO: 7158 - DNA, 23 bp, Artificial Sequence
  human ApoB siRNA sequence
agatcaattgggaactacaattt

SEQ ID NO: 7159 - DNA, 23 bp, Artificial Sequence
  human ApoB siRNA sequence
gatcaattgggaactacaatttc

SEQ ID NO: 7160 - DNA, 23 bp, Artificial Sequence
  human ApoB siRNA sequence
atcaattgggaactacaatttca

SEQ ID NO: 7161 - DNA, 23 bp, Artificial Sequence
  human ApoB siRNA sequence
tcaattgggaactacaatttcat

SEQ ID NO: 7162 - DNA, 23 bp, Artificial Sequence
  human ApoB siRNA sequence
caattgggaactacaatttcatt

SEQ ID NO: 7163 - DNA, 23 bp, Artificial Sequence
  human ApoB siRNA sequence
aattgggaactacaatttcattt

SEQ ID NO: 7164 - DNA, 23 bp, Artificial Sequence
  human ApoB siRNA sequence
attgggaactacaatttcatttg

SEQ ID NO: 7165 - DNA, 23 bp, Artificial Sequence
  human ApoB siRNA sequence
ttgggaactacaatttcatttga

SEQ ID NO: 7166 - DNA, 23 bp, Artificial Sequence
  human ApoB siRNA sequence
tgggaactacaatttcatttgaa

SEQ ID NO: 7167 - DNA, 23 bp, Artificial Sequence
  human ApoB siRNA sequence
gggaactacaatttcatttgaaa

SEQ ID NO: 7168 - DNA, 23 bp, Artificial Sequence
  human ApoB siRNA sequence
ggaactacaatttcatttgaaag

SEQ ID NO: 7169 - DNA, 23 bp, Artificial Sequence
  human ApoB siRNA sequence
gaactacaatttcatttgaaaga

SEQ ID NO: 7170 - DNA, 23 bp, Artificial Sequence
  human ApoB siRNA sequence
aactacaatttcatttgaaagaa

SEQ ID NO: 7171 - DNA, 23 bp, Artificial Sequence
  human ApoB siRNA sequence
actacaatttcatttgaaagaat

SEQ ID NO: 7172 - DNA, 23 bp, Artificial Sequence
  human ApoB siRNA sequence
ctacaatttcatttgaaagaata

SEQ ID NO: 7173 - DNA, 23 bp, Artificial Sequence
  human ApoB siRNA sequence
tacaatttcatttgaaagaataa

SEQ ID NO: 7174 - DNA, 23 bp, Artificial Sequence
  human ApoB siRNA sequence
acaatttcatttgaaagaataaa

SEQ ID NO: 7175 - DNA, 23 bp, Artificial Sequence
  human ApoB siRNA sequence
caatttcatttgaaagaataaat

SEQ ID NO: 7176 - DNA, 23 bp, Artificial Sequence
  human ApoB siRNA sequence
aatttcatttgaaagaataaatg

SEQ ID NO: 7177 - DNA, 23 bp, Artificial Sequence
  human ApoB siRNA sequence
atttcatttgaaagaataaatga

SEQ ID NO: 7178 - DNA, 23 bp, Artificial Sequence
  human ApoB siRNA sequence
tttcatttgaaagaataaatgat

SEQ ID NO: 7179 - DNA, 23 bp, Artificial Sequence
  human ApoB siRNA sequence
ttcatttgaaagaataaatgatg

SEQ ID NO: 7180 - DNA, 23 bp, Artificial Sequence
  human ApoB siRNA sequence
tcatttgaaagaataaatgatgt

SEQ ID NO: 7181 - DNA, 23 bp, Artificial Sequence
  human ApoB siRNA sequence
catttgaaagaataaatgatgtt

SEQ ID NO: 7182 - DNA, 23 bp, Artificial Sequence
  human ApoB siRNA sequence
atttgaaagaataaatgatgttc

SEQ ID NO: 7183 - DNA, 23 bp, Artificial Sequence
  human ApoB siRNA sequence
tttgaaagaataaatgatgttct

SEQ ID NO: 7184 - DNA, 23 bp, Artificial Sequence
  human ApoB siRNA sequence
ttgaaagaataaatgatgttctt

SEQ ID NO: 7185 - DNA, 23 bp, Artificial Sequence
  human ApoB siRNA sequence
tgaaagaataaatgatgttcttg

SEQ ID NO: 7186 - DNA, 23 bp, Artificial Sequence
  human ApoB siRNA sequence
gaaagaataaatgatgttcttga

SEQ ID NO: 7187 - DNA, 23 bp, Artificial Sequence
  human ApoB siRNA sequence
aaagaataaatgatgttcttgag

SEQ ID NO: 7188 - DNA, 23 bp, Artificial Sequence
  human ApoB siRNA sequence
aagaataaatgatgttcttgagc

SEQ ID NO: 7189 - DNA, 23 bp, Artificial Sequence
  human ApoB siRNA sequence
agaataaatgatgttcttgagca

SEQ ID NO: 7190 - DNA, 23 bp, Artificial Sequence
  human ApoB siRNA sequence
gaataaatgatgttcttgagcat

SEQ ID NO: 7191 - DNA, 23 bp, Artificial Sequence
  human ApoB siRNA sequence
aataaatgatgttcttgagcatg

SEQ ID NO: 7192 - DNA, 23 bp, Artificial Sequence
  human ApoB siRNA sequence
ataaatgatgttcttgagcatgt

SEQ ID NO: 7193 - DNA, 23 bp, Artificial Sequence
  human ApoB siRNA sequence
taaatgatgttcttgagcatgtc

SEQ ID NO: 7194 - DNA, 23 bp, Artificial Sequence
  human ApoB siRNA sequence
aaatgatgttcttgagcatgtca

SEQ ID NO: 7195 - DNA, 23 bp, Artificial Sequence
  human ApoB siRNA sequence
aatgatgttcttgagcatgtcaa

SEQ ID NO: 7196 - DNA, 23 bp, Artificial Sequence
  human ApoB siRNA sequence
atgatgttcttgagcatgtcaaa

SEQ ID NO: 7197 - DNA, 23 bp, Artificial Sequence
  human ApoB siRNA sequence
tgatgttcttgagcatgtcaaac

SEQ ID NO: 7198 - DNA, 23 bp, Artificial Sequence
  human ApoB siRNA sequence
gatgttcttgagcatgtcaaaca

SEQ ID NO: 7199 - DNA, 23 bp, Artificial Sequence
  human ApoB siRNA sequence
atgttcttgagcatgtcaaacac

SEQ ID NO: 7200 - DNA, 23 bp, Artificial Sequence
  human ApoB siRNA sequence
tgttcttgagcatgtcaaacact

SEQ ID NO: 7201 - DNA, 23 bp, Artificial Sequence
  human ApoB siRNA sequence
gttcttgagcatgtcaaacactt

SEQ ID NO: 7202 - DNA, 23 bp, Artificial Sequence
  human ApoB siRNA sequence
ttcttgagcatgtcaaacacttt

SEQ ID NO: 7203 - DNA, 23 bp, Artificial Sequence
  human ApoB siRNA sequence
tcttgagcatgtcaaacactttg

SEQ ID NO: 7204 - DNA, 23 bp, Artificial Sequence
  human ApoB siRNA sequence
cttgagcatgtcaaacactttgt

SEQ ID NO: 7205 - DNA, 23 bp, Artificial Sequence
  human ApoB siRNA sequence
ttgagcatgtcaaacactttgtt

SEQ ID NO: 7206 - DNA, 23 bp, Artificial Sequence
  human ApoB siRNA sequence
tgagcatgtcaaacactttgtta

SEQ ID NO: 7207 - DNA, 23 bp, Artificial Sequence
  human ApoB siRNA sequence
gagcatgtcaaacactttgttat

SEQ ID NO: 7208 - DNA, 23 bp, Artificial Sequence
  human ApoB siRNA sequence
agcatgtcaaacactttgttata

SEQ ID NO: 7209 - DNA, 23 bp, Artificial Sequence
  human ApoB siRNA sequence
gcatgtcaaacactttgttataa

SEQ ID NO: 7210 - DNA, 23 bp, Artificial Sequence
  human ApoB siRNA sequence
catgtcaaacactttgttataaa

SEQ ID NO: 7211 - DNA, 23 bp, Artificial Sequence
  human ApoB siRNA sequence
atgtcaaacactttgttataaat

SEQ ID NO: 7212 - DNA, 23 bp, Artificial Sequence
  human ApoB siRNA sequence
tgtcaaacactttgttataaatc

SEQ ID NO: 7213 - DNA, 23 bp, Artificial Sequence
  human ApoB siRNA sequence
gtcaaacactttgttataaatct

SEQ ID NO: 7214 - DNA, 23 bp, Artificial Sequence
  human ApoB siRNA sequence
tcaaacactttgttataaatctt

SEQ ID NO: 7215 - DNA, 23 bp, Artificial Sequence
  human ApoB siRNA sequence
caaacactttgttataaatctta

SEQ ID NO: 7216 - DNA, 23 bp, Artificial Sequence
  human ApoB siRNA sequence
aaacactttgttataaatcttat

SEQ ID NO: 7217 - DNA, 23 bp, Artificial Sequence
  human ApoB siRNA sequence
aacactttgttataaatcttatt

SEQ ID NO: 7218 - DNA, 23 bp, Artificial Sequence
  human ApoB siRNA sequence
acactttgttataaatcttattg

SEQ ID NO: 7219 - DNA, 23 bp, Artificial Sequence
  human ApoB siRNA sequence
cactttgttataaatcttattgg

SEQ ID NO: 7220 - DNA, 23 bp, Artificial Sequence
  human ApoB siRNA sequence
actttgttataaatcttattggg

SEQ ID NO: 7221 - DNA, 23 bp, Artificial Sequence
  human ApoB siRNA sequence
ctttgttataaatcttattgggg

SEQ ID NO: 7222 - DNA, 23 bp, Artificial Sequence
  human ApoB siRNA sequence
tttgttataaatcttattgggga

SEQ ID NO: 7223 - DNA, 23 bp, Artificial Sequence
  human ApoB siRNA sequence
ttgttataaatcttattggggat

SEQ ID NO: 7224 - DNA, 23 bp, Artificial Sequence
  human ApoB siRNA sequence
tgttataaatcttattggggatt

SEQ ID NO: 7225 - DNA, 23 bp, Artificial Sequence
  human ApoB siRNA sequence
gttataaatcttattggggattt

SEQ ID NO: 7226 - DNA, 23 bp, Artificial Sequence
  human ApoB siRNA sequence
ttataaatcttattggggatttt

SEQ ID NO: 7227 - DNA, 23 bp, Artificial Sequence
  human ApoB siRNA sequence
tataaatcttattggggattttg

SEQ ID NO: 7228 - DNA, 23 bp, Artificial Sequence
  human ApoB siRNA sequence
ataaatcttattggggattttga

SEQ ID NO: 7229 - DNA, 23 bp, Artificial Sequence
  human ApoB siRNA sequence
taaatcttattggggattttgaa

SEQ ID NO: 7230 - DNA, 23 bp, Artificial Sequence
  human ApoB siRNA sequence
aaatcttattggggattttgaag

SEQ ID NO: 7231 - DNA, 23 bp, Artificial Sequence
  human ApoB siRNA sequence
aatcttattggggattttgaagt

SEQ ID NO: 7232 - DNA, 23 bp, Artificial Sequence
  human ApoB siRNA sequence
atcttattggggattttgaagta

SEQ ID NO: 7233 - DNA, 23 bp, Artificial Sequence
  human ApoB siRNA sequence
tcttattggggattttgaagtag

SEQ ID NO: 7234 - DNA, 23 bp, Artificial Sequence
  human ApoB siRNA sequence
cttattggggattttgaagtagc

SEQ ID NO: 7235 - DNA, 23 bp, Artificial Sequence
  human ApoB siRNA sequence
ttattggggattttgaagtagct

SEQ ID NO: 7236 - DNA, 23 bp, Artificial Sequence
  human ApoB siRNA sequence
tattggggattttgaagtagctg

SEQ ID NO: 7237 - DNA, 23 bp, Artificial Sequence
  human ApoB siRNA sequence
attggggattttgaagtagctga

SEQ ID NO: 7238 - DNA, 23 bp, Artificial Sequence
  human ApoB siRNA sequence
ttggggattttgaagtagctgag

SEQ ID NO: 7239 - DNA, 23 bp, Artificial Sequence
  human ApoB siRNA sequence
tggggattttgaagtagctgaga

SEQ ID NO: 7240 - DNA, 23 bp, Artificial Sequence
  human ApoB siRNA sequence
ggggattttgaagtagctgagaa

SEQ ID NO: 7241 - DNA, 23 bp, Artificial Sequence
  human ApoB siRNA sequence
gggattttgaagtagctgagaaa

SEQ ID NO: 7242 - DNA, 23 bp, Artificial Sequence
  human ApoB siRNA sequence
ggattttgaagtagctgagaaaa

SEQ ID NO: 7243 - DNA, 23 bp, Artificial Sequence
  human ApoB siRNA sequence
gattttgaagtagctgagaaaat

SEQ ID NO: 7244 - DNA, 23 bp, Artificial Sequence
  human ApoB siRNA sequence
attttgaagtagctgagaaaatc

SEQ ID NO: 7245 - DNA, 23 bp, Artificial Sequence
  human ApoB siRNA sequence
ttttgaagtagctgagaaaatca

SEQ ID NO: 7246 - DNA, 23 bp, Artificial Sequence
  human ApoB siRNA sequence
tttgaagtagctgagaaaatcaa

SEQ ID NO: 7247 - DNA, 23 bp, Artificial Sequence
  human ApoB siRNA sequence
ttgaagtagctgagaaaatcaat

SEQ ID NO: 7248 - DNA, 23 bp, Artificial Sequence
  human ApoB siRNA sequence
tgaagtagctgagaaaatcaatg

SEQ ID NO: 7249 - DNA, 23 bp, Artificial Sequence
  human ApoB siRNA sequence
gaagtagctgagaaaatcaatgc

SEQ ID NO: 7250 - DNA, 23 bp, Artificial Sequence
  human ApoB siRNA sequence
aagtagctgagaaaatcaatgcc

SEQ ID NO: 7251 - DNA, 23 bp, Artificial Sequence
  human ApoB siRNA sequence
agtagctgagaaaatcaatgcct

SEQ ID NO: 7252 - DNA, 23 bp, Artificial Sequence
  human ApoB siRNA sequence
gtagctgagaaaatcaatgcctt

SEQ ID NO: 7253 - DNA, 23 bp, Artificial Sequence
  human ApoB siRNA sequence
tagctgagaaaatcaatgccttc

SEQ ID NO: 7254 - DNA, 23 bp, Artificial Sequence
  human ApoB siRNA sequence
agctgagaaaatcaatgccttca

SEQ ID NO: 7255 - DNA, 23 bp, Artificial Sequence
  human ApoB siRNA sequence
gctgagaaaatcaatgccttcag

SEQ ID NO: 7256 - DNA, 23 bp, Artificial Sequence
  human ApoB siRNA sequence
ctgagaaaatcaatgccttcaga

SEQ ID NO: 7257 - DNA, 23 bp, Artificial Sequence
  human ApoB siRNA sequence
tgagaaaatcaatgccttcagag

SEQ ID NO: 7258 - DNA, 23 bp, Artificial Sequence
  human ApoB siRNA sequence
gagaaaatcaatgccttcagagc

SEQ ID NO: 7259 - DNA, 23 bp, Artificial Sequence
  human ApoB siRNA sequence
agaaaatcaatgccttcagagcc

SEQ ID NO: 7260 - DNA, 23 bp, Artificial Sequence
  human ApoB siRNA sequence
gaaaatcaatgccttcagagcca

SEQ ID NO: 7261 - DNA, 23 bp, Artificial Sequence
  human ApoB siRNA sequence
aaaatcaatgccttcagagccaa

SEQ ID NO: 7262 - DNA, 23 bp, Artificial Sequence
  human ApoB siRNA sequence
aaatcaatgccttcagagccaaa

SEQ ID NO: 7263 - DNA, 23 bp, Artificial Sequence
  human ApoB siRNA sequence
aatcaatgccttcagagccaaag

SEQ ID NO: 7264 - DNA, 23 bp, Artificial Sequence
  human ApoB siRNA sequence
atcaatgccttcagagccaaagt

SEQ ID NO: 7265 - DNA, 23 bp, Artificial Sequence
  human ApoB siRNA sequence
tcaatgccttcagagccaaagtc

SEQ ID NO: 7266 - DNA, 23 bp, Artificial Sequence
  human ApoB siRNA sequence
caatgccttcagagccaaagtcc

SEQ ID NO: 7267 - DNA, 23 bp, Artificial Sequence
  human ApoB siRNA sequence
aatgccttcagagccaaagtcca

SEQ ID NO: 7268 - DNA, 23 bp, Artificial Sequence
  human ApoB siRNA sequence
atgccttcagagccaaagtccat

SEQ ID NO: 7269 - DNA, 23 bp, Artificial Sequence
  human ApoB siRNA sequence
tgccttcagagccaaagtccatg

SEQ ID NO: 7270 - DNA, 23 bp, Artificial Sequence
  human ApoB siRNA sequence
gccttcagagccaaagtccatga

SEQ ID NO: 7271 - DNA, 23 bp, Artificial Sequence
  human ApoB siRNA sequence
ccttcagagccaaagtccatgag

SEQ ID NO: 7272 - DNA, 23 bp, Artificial Sequence
  human ApoB siRNA sequence
cttcagagccaaagtccatgagt

SEQ ID NO: 7273 - DNA, 23 bp, Artificial Sequence
  human ApoB siRNA sequence
ttcagagccaaagtccatgagtt

SEQ ID NO: 7274 - DNA, 23 bp, Artificial Sequence
  human ApoB siRNA sequence
tcagagccaaagtccatgagtta

SEQ ID NO: 7275 - DNA, 23 bp, Artificial Sequence
  human ApoB siRNA sequence
cagagccaaagtccatgagttaa

SEQ ID NO: 7276 - DNA, 23 bp, Artificial Sequence
  human ApoB siRNA sequence
agagccaaagtccatgagttaat

SEQ ID NO: 7277 - DNA, 23 bp, Artificial Sequence
  human ApoB siRNA sequence
gagccaaagtccatgagttaatc

SEQ ID NO: 7278 - DNA, 23 bp, Artificial Sequence
  human ApoB siRNA sequence
agccaaagtccatgagttaatcg

SEQ ID NO: 7279 - DNA, 23 bp, Artificial Sequence
  human ApoB siRNA sequence
gccaaagtccatgagttaatcga

SEQ ID NO: 7280 - DNA, 23 bp, Artificial Sequence
  human ApoB siRNA sequence
ccaaagtccatgagttaatcgag

SEQ ID NO: 7281 - DNA, 23 bp, Artificial Sequence
  human ApoB siRNA sequence
caaagtccatgagttaatcgaga

SEQ ID NO: 7282 - DNA, 23 bp, Artificial Sequence
  human ApoB siRNA sequence
aaagtccatgagttaatcgagag

SEQ ID NO: 7283 - DNA, 23 bp, Artificial Sequence
  human ApoB siRNA sequence
aagtccatgagttaatcgagagg

SEQ ID NO: 7284 - DNA, 23 bp, Artificial Sequence
  human ApoB siRNA sequence
agtccatgagttaatcgagaggt

SEQ ID NO: 7285 - DNA, 23 bp, Artificial Sequence
  human ApoB siRNA sequence
gtccatgagttaatcgagaggta

SEQ ID NO: 7286 - DNA, 23 bp, Artificial Sequence
  human ApoB siRNA sequence
tccatgagttaatcgagaggtat

SEQ ID NO: 7287 - DNA, 23 bp, Artificial Sequence
  human ApoB siRNA sequence
ccatgagttaatcgagaggtatg

SEQ ID NO: 7288 - DNA, 23 bp, Artificial Sequence
  human ApoB siRNA sequence
catgagttaatcgagaggtatga

SEQ ID NO: 7289 - DNA, 23 bp, Artificial Sequence
  human ApoB siRNA sequence
atgagttaatcgagaggtatgaa

SEQ ID NO: 7290 - DNA, 23 bp, Artificial Sequence
  human ApoB siRNA sequence
tgagttaatcgagaggtatgaag

SEQ ID NO: 7291 - DNA, 23 bp, Artificial Sequence
  human ApoB siRNA sequence
gagttaatcgagaggtatgaagt

SEQ ID NO: 7292 - DNA, 23 bp, Artificial Sequence
  human ApoB siRNA sequence
agttaatcgagaggtatgaagta

SEQ ID NO: 7293 - DNA, 23 bp, Artificial Sequence
  human ApoB siRNA sequence
gttaatcgagaggtatgaagtag

SEQ ID NO: 7294 - DNA, 23 bp, Artificial Sequence
  human ApoB siRNA sequence
ttaatcgagaggtatgaagtaga

SEQ ID NO: 7295 - DNA, 23 bp, Artificial Sequence
  human ApoB siRNA sequence
taatcgagaggtatgaagtagac

SEQ ID NO: 7296 - DNA, 23 bp, Artificial Sequence
  human ApoB siRNA sequence
aatcgagaggtatgaagtagacc

SEQ ID NO: 7297 - DNA, 23 bp, Artificial Sequence
  human ApoB siRNA sequence
atcgagaggtatgaagtagacca

SEQ ID NO: 7298 - DNA, 23 bp, Artificial Sequence
  human ApoB siRNA sequence
tcgagaggtatgaagtagaccaa

SEQ ID NO: 7299 - DNA, 23 bp, Artificial Sequence
  human ApoB siRNA sequence
cgagaggtatgaagtagaccaac

SEQ ID NO: 7300 - DNA, 23 bp, Artificial Sequence
  human ApoB siRNA sequence
gagaggtatgaagtagaccaaca

SEQ ID NO: 7301 - DNA, 23 bp, Artificial Sequence
  human ApoB siRNA sequence
agaggtatgaagtagaccaacaa

SEQ ID NO: 7302 - DNA, 23 bp, Artificial Sequence
  human ApoB siRNA sequence
gaggtatgaagtagaccaacaaa

SEQ ID NO: 7303 - DNA, 23 bp, Artificial Sequence
  human ApoB siRNA sequence
aggtatgaagtagaccaacaaat

SEQ ID NO: 7304 - DNA, 23 bp, Artificial Sequence
  human ApoB siRNA sequence
ggtatgaagtagaccaacaaatc

SEQ ID NO: 7305 - DNA, 23 bp, Artificial Sequence
  human ApoB siRNA sequence
gtatgaagtagaccaacaaatcc

SEQ ID NO: 7306 - DNA, 23 bp, Artificial Sequence
  human ApoB siRNA sequence
tatgaagtagaccaacaaatcca

SEQ ID NO: 7307 - DNA, 23 bp, Artificial Sequence
  human ApoB siRNA sequence
atgaagtagaccaacaaatccag

SEQ ID NO: 7308 - DNA, 23 bp, Artificial Sequence
  human ApoB siRNA sequence
tgaagtagaccaacaaatccagg

SEQ ID NO: 7309 - DNA, 23 bp, Artificial Sequence
  human ApoB siRNA sequence
gaagtagaccaacaaatccaggt

SEQ ID NO: 7310 - DNA, 23 bp, Artificial Sequence
  human ApoB siRNA sequence
aagtagaccaacaaatccaggtt

SEQ ID NO: 7311 - DNA, 23 bp, Artificial Sequence
  human ApoB siRNA sequence
agtagaccaacaaatccaggttt

SEQ ID NO: 7312 - DNA, 23 bp, Artificial Sequence
  human ApoB siRNA sequence
gtagaccaacaaatccaggtttt

SEQ ID NO: 7313 - DNA, 23 bp, Artificial Sequence
  human ApoB siRNA sequence
tagaccaacaaatccaggtttta

SEQ ID NO: 7314 - DNA, 23 bp, Artificial Sequence
  human ApoB siRNA sequence
agaccaacaaatccaggttttaa

SEQ ID NO: 7315 - DNA, 23 bp, Artificial Sequence
  human ApoB siRNA sequence
gaccaacaaatccaggttttaat

SEQ ID NO: 7316 - DNA, 23 bp, Artificial Sequence
  human ApoB siRNA sequence
accaacaaatccaggttttaatg

SEQ ID NO: 7317 - DNA, 23 bp, Artificial Sequence
  human ApoB siRNA sequence
ccaacaaatccaggttttaatgg

SEQ ID NO: 7318 - DNA, 23 bp, Artificial Sequence
  human ApoB siRNA sequence
caacaaatccaggttttaatgga

SEQ ID NO: 7319 - DNA, 23 bp, Artificial Sequence
  human ApoB siRNA sequence
aacaaatccaggttttaatggat

SEQ ID NO: 7320 - DNA, 23 bp, Artificial Sequence
  human ApoB siRNA sequence
acaaatccaggttttaatggata

SEQ ID NO: 7321 - DNA, 23 bp, Artificial Sequence
  human ApoB siRNA sequence
caaatccaggttttaatggataa

SEQ ID NO: 7322 - DNA, 23 bp, Artificial Sequence
  human ApoB siRNA sequence
aaatccaggttttaatggataaa

SEQ ID NO: 7323 - DNA, 23 bp, Artificial Sequence
  human ApoB siRNA sequence
aatccaggttttaatggataaat

SEQ ID NO: 7324 - DNA, 23 bp, Artificial Sequence
  human ApoB siRNA sequence
atccaggttttaatggataaatt

SEQ ID NO: 7325 - DNA, 23 bp, Artificial Sequence
  human ApoB siRNA sequence
tccaggttttaatggataaatta

SEQ ID NO: 7326 - DNA, 23 bp, Artificial Sequence
  human ApoB siRNA sequence
ccaggttttaatggataaattag

SEQ ID NO: 7327 - DNA, 23 bp, Artificial Sequence
  human ApoB siRNA sequence
caggttttaatggataaattagt

SEQ ID NO: 7328 - DNA, 23 bp, Artificial Sequence
  human ApoB siRNA sequence
aggttttaatggataaattagta

SEQ ID NO: 7329 - DNA, 23 bp, Artificial Sequence
  human ApoB siRNA sequence
ggttttaatggataaattagtag

SEQ ID NO: 7330 - DNA, 23 bp, Artificial Sequence
  human ApoB siRNA sequence
gttttaatggataaattagtaga

SEQ ID NO: 7331 - DNA, 23 bp, Artificial Sequence
  human ApoB siRNA sequence
ttttaatggataaattagtagag

SEQ ID NO: 7332 - DNA, 23 bp, Artificial Sequence
  human ApoB siRNA sequence
tttaatggataaattagtagagt

SEQ ID NO: 7333 - DNA, 23 bp, Artificial Sequence
  human ApoB siRNA sequence
ttaatggataaattagtagagtt

SEQ ID NO: 7334 - DNA, 23 bp, Artificial Sequence
  human ApoB siRNA sequence
taatggataaattagtagagttg

SEQ ID NO: 7335 - DNA, 23 bp, Artificial Sequence
  human ApoB siRNA sequence
aatggataaattagtagagttga

SEQ ID NO: 7336 - DNA, 23 bp, Artificial Sequence
  human ApoB siRNA sequence
atggataaattagtagagttgac

SEQ ID NO: 7337 - DNA, 23 bp, Artificial Sequence
  human ApoB siRNA sequence
tggataaattagtagagttgacc

SEQ ID NO: 7338 - DNA, 23 bp, Artificial Sequence
  human ApoB siRNA sequence
ggataaattagtagagttgaccc

SEQ ID NO: 7339 - DNA, 23 bp, Artificial Sequence
  human ApoB siRNA sequence
gataaattagtagagttgaccca

SEQ ID NO: 7340 - DNA, 23 bp, Artificial Sequence
  human ApoB siRNA sequence
ataaattagtagagttgacccac

SEQ ID NO: 7341 - DNA, 23 bp, Artificial Sequence
  human ApoB siRNA sequence
taaattagtagagttgacccacc

SEQ ID NO: 7342 - DNA, 23 bp, Artificial Sequence
  human ApoB siRNA sequence
aaattagtagagttgacccacca

SEQ ID NO: 7343 - DNA, 23 bp, Artificial Sequence
  human ApoB siRNA sequence
aattagtagagttgacccaccaa

SEQ ID NO: 7344 - DNA, 23 bp, Artificial Sequence
  human ApoB siRNA sequence
attagtagagttgacccaccaat

SEQ ID NO: 7345 - DNA, 23 bp, Artificial Sequence
  human ApoB siRNA sequence
ttagtagagttgacccaccaata

SEQ ID NO: 7346 - DNA, 23 bp, Artificial Sequence
  human ApoB siRNA sequence
tagtagagttgacccaccaatac

SEQ ID NO: 7347 - DNA, 23 bp, Artificial Sequence
  human ApoB siRNA sequence
agtagagttgacccaccaataca

SEQ ID NO: 7348 - DNA, 23 bp, Artificial Sequence
  human ApoB siRNA sequence
gtagagttgacccaccaatacaa

SEQ ID NO: 7349 - DNA, 23 bp, Artificial Sequence
  human ApoB siRNA sequence
tagagttgacccaccaatacaag

SEQ ID NO: 7350 - DNA, 23 bp, Artificial Sequence
  human ApoB siRNA sequence
agagttgacccaccaatacaagt

SEQ ID NO: 7351 - DNA, 23 bp, Artificial Sequence
  human ApoB siRNA sequence
gagttgacccaccaatacaagtt

SEQ ID NO: 7352 - DNA, 23 bp, Artificial Sequence
  human ApoB siRNA sequence
agttgacccaccaatacaagttg

SEQ ID NO: 7353 - DNA, 23 bp, Artificial Sequence
  human ApoB siRNA sequence
gttgacccaccaatacaagttga

SEQ ID NO: 7354 - DNA, 23 bp, Artificial Sequence
  human ApoB siRNA sequence
ttgacccaccaatacaagttgaa

SEQ ID NO: 7355 - DNA, 23 bp, Artificial Sequence
  human ApoB siRNA sequence
tgacccaccaatacaagttgaag

SEQ ID NO: 7356 - DNA, 23 bp, Artificial Sequence
  human ApoB siRNA sequence
gacccaccaatacaagttgaagg

SEQ ID NO: 7357 - DNA, 23 bp, Artificial Sequence
  human ApoB siRNA sequence
acccaccaatacaagttgaagga

SEQ ID NO: 7358 - DNA, 23 bp, Artificial Sequence
  human ApoB siRNA sequence
cccaccaatacaagttgaaggag

SEQ ID NO: 7359 - DNA, 23 bp, Artificial Sequence
  human ApoB siRNA sequence
ccaccaatacaagttgaaggaga

SEQ ID NO: 7360 - DNA, 23 bp, Artificial Sequence
  human ApoB siRNA sequence
caccaatacaagttgaaggagac

SEQ ID NO: 7361 - DNA, 23 bp, Artificial Sequence
  human ApoB siRNA sequence
accaatacaagttgaaggagact

SEQ ID NO: 7362 - DNA, 23 bp, Artificial Sequence
  human ApoB siRNA sequence
ccaatacaagttgaaggagacta

SEQ ID NO: 7363 - DNA, 23 bp, Artificial Sequence
  human ApoB siRNA sequence
caatacaagttgaaggagactat

SEQ ID NO: 7364 - DNA, 23 bp, Artificial Sequence
  human ApoB siRNA sequence
aatacaagttgaaggagactatt

SEQ ID NO: 7365 - DNA, 23 bp, Artificial Sequence
  human ApoB siRNA sequence
atacaagttgaaggagactattc

SEQ ID NO: 7366 - DNA, 23 bp, Artificial Sequence
  human ApoB siRNA sequence
tacaagttgaaggagactattca

SEQ ID NO: 7367 - DNA, 23 bp, Artificial Sequence
  human ApoB siRNA sequence
acaagttgaaggagactattcag

SEQ ID NO: 7368 - DNA, 23 bp, Artificial Sequence
  human ApoB siRNA sequence
caagttgaaggagactattcaga

SEQ ID NO: 7369 - DNA, 23 bp, Artificial Sequence
  human ApoB siRNA sequence
aagttgaaggagactattcagaa

SEQ ID NO: 7370 - DNA, 23 bp, Artificial Sequence
  human ApoB siRNA sequence
agttgaaggagactattcagaag

SEQ ID NO: 7371 - DNA, 23 bp, Artificial Sequence
  human ApoB siRNA sequence
gttgaaggagactattcagaagc

SEQ ID NO: 7372 - DNA, 23 bp, Artificial Sequence
  human ApoB siRNA sequence
ttgaaggagactattcagaagct

SEQ ID NO: 7373 - DNA, 23 bp, Artificial Sequence
  human ApoB siRNA sequence
tgaaggagactattcagaagcta

SEQ ID NO: 7374 - DNA, 23 bp, Artificial Sequence
  human ApoB siRNA sequence
gaaggagactattcagaagctaa

SEQ ID NO: 7375 - DNA, 23 bp, Artificial Sequence
  human ApoB siRNA sequence
aaggagactattcagaagctaag

SEQ ID NO: 7376 - DNA, 23 bp, Artificial Sequence
  human ApoB siRNA sequence
aggagactattcagaagctaagc

SEQ ID NO: 7377 - DNA, 23 bp, Artificial Sequence
  human ApoB siRNA sequence
ggagactattcagaagctaagca

SEQ ID NO: 7378 - DNA, 23 bp, Artificial Sequence
  human ApoB siRNA sequence
gagactattcagaagctaagcaa

SEQ ID NO: 7379 - DNA, 23 bp, Artificial Sequence
  human ApoB siRNA sequence
agactattcagaagctaagcaat

SEQ ID NO: 7380 - DNA, 23 bp, Artificial Sequence
  human ApoB siRNA sequence
gactattcagaagctaagcaatg

SEQ ID NO: 7381 - DNA, 23 bp, Artificial Sequence
  human ApoB siRNA sequence
actattcagaagctaagcaatgt

SEQ ID NO: 7382 - DNA, 23 bp, Artificial Sequence
  human ApoB siRNA sequence
ctattcagaagctaagcaatgtc

SEQ ID NO: 7383 - DNA, 23 bp, Artificial Sequence
  human ApoB siRNA sequence
tattcagaagctaagcaatgtcc

SEQ ID NO: 7384 - DNA, 23 bp, Artificial Sequence
  human ApoB siRNA sequence
attcagaagctaagcaatgtcct

SEQ ID NO: 7385 - DNA, 23 bp, Artificial Sequence
  human ApoB siRNA sequence
ttcagaagctaagcaatgtccta

SEQ ID NO: 7386 - DNA, 23 bp, Artificial Sequence
  human ApoB siRNA sequence
tcagaagctaagcaatgtcctac

SEQ ID NO: 7387 - DNA, 23 bp, Artificial Sequence
  human ApoB siRNA sequence
cagaagctaagcaatgtcctaca

SEQ ID NO: 7388 - DNA, 23 bp, Artificial Sequence
  human ApoB siRNA sequence
agaagctaagcaatgtcctacaa

SEQ ID NO: 7389 - DNA, 23 bp, Artificial Sequence
  human ApoB siRNA sequence
gaagctaagcaatgtcctacaac

SEQ ID NO: 7390 - DNA, 23 bp, Artificial Sequence
  human ApoB siRNA sequence
aagctaagcaatgtcctacaaca

SEQ ID NO: 7391 - DNA, 23 bp, Artificial Sequence
  human ApoB siRNA sequence
agctaagcaatgtcctacaacaa

SEQ ID NO: 7392 - DNA, 23 bp, Artificial Sequence
  human ApoB siRNA sequence
gctaagcaatgtcctacaacaag

SEQ ID NO: 7393 - DNA, 23 bp, Artificial Sequence
  human ApoB siRNA sequence
ctaagcaatgtcctacaacaagt

SEQ ID NO: 7394 - DNA, 23 bp, Artificial Sequence
  human ApoB siRNA sequence
taagcaatgtcctacaacaagtt

SEQ ID NO: 7395 - DNA, 23 bp, Artificial Sequence
  human ApoB siRNA sequence
aagcaatgtcctacaacaagtta

SEQ ID NO: 7396 - DNA, 23 bp, Artificial Sequence
  human ApoB siRNA sequence
agcaatgtcctacaacaagttaa

SEQ ID NO: 7397 - DNA, 23 bp, Artificial Sequence
  human ApoB siRNA sequence
gcaatgtcctacaacaagttaag

SEQ ID NO: 7398 - DNA, 23 bp, Artificial Sequence
  human ApoB siRNA sequence
caatgtcctacaacaagttaaga

SEQ ID NO: 7399 - DNA, 23 bp, Artificial Sequence
  human ApoB siRNA sequence
aatgtcctacaacaagttaagat

SEQ ID NO: 7400 - DNA, 23 bp, Artificial Sequence
  human ApoB siRNA sequence
atgtcctacaacaagttaagata

SEQ ID NO: 7401 - DNA, 23 bp, Artificial Sequence
  human ApoB siRNA sequence
tgtcctacaacaagttaagataa

SEQ ID NO: 7402 - DNA, 23 bp, Artificial Sequence
  human ApoB siRNA sequence
gtcctacaacaagttaagataaa

SEQ ID NO: 7403 - DNA, 23 bp, Artificial Sequence
  human ApoB siRNA sequence
tcctacaacaagttaagataaaa

SEQ ID NO: 7404 - DNA, 23 bp, Artificial Sequence
  human ApoB siRNA sequence
cctacaacaagttaagataaaag

SEQ ID NO: 7405 - DNA, 23 bp, Artificial Sequence
  human ApoB siRNA sequence
ctacaacaagttaagataaaaga

SEQ ID NO: 7406 - DNA, 23 bp, Artificial Sequence
  human ApoB siRNA sequence
tacaacaagttaagataaaagat

SEQ ID NO: 7407 - DNA, 23 bp, Artificial Sequence
  human ApoB siRNA sequence
acaacaagttaagataaaagatt

SEQ ID NO: 7408 - DNA, 23 bp, Artificial Sequence
  human ApoB siRNA sequence
caacaagttaagataaaagatta

SEQ ID NO: 7409 - DNA, 23 bp, Artificial Sequence
  human ApoB siRNA sequence
aacaagttaagataaaagattac

SEQ ID NO: 7410 - DNA, 23 bp, Artificial Sequence
  human ApoB siRNA sequence
acaagttaagataaaagattact

SEQ ID NO: 7411 - DNA, 23 bp, Artificial Sequence
  human ApoB siRNA sequence
caagttaagataaaagattactt

SEQ ID NO: 7412 - DNA, 23 bp, Artificial Sequence
  human ApoB siRNA sequence
aagttaagataaaagattacttt

SEQ ID NO: 7413 - DNA, 23 bp, Artificial Sequence
  human ApoB siRNA sequence
agttaagataaaagattactttg

SEQ ID NO: 7414 - DNA, 23 bp, Artificial Sequence
  human ApoB siRNA sequence
gttaagataaaagattactttga

SEQ ID NO: 7415 - DNA, 23 bp, Artificial Sequence
  human ApoB siRNA sequence
ttaagataaaagattactttgag

SEQ ID NO: 7416 - DNA, 23 bp, Artificial Sequence
  human ApoB siRNA sequence
taagataaaagattactttgaga

SEQ ID NO: 7417 - DNA, 23 bp, Artificial Sequence
  human ApoB siRNA sequence
aagataaaagattactttgagaa

SEQ ID NO: 7418 - DNA, 23 bp, Artificial Sequence
  human ApoB siRNA sequence
agataaaagattactttgagaaa

SEQ ID NO: 7419 - DNA, 23 bp, Artificial Sequence
  human ApoB siRNA sequence
gataaaagattactttgagaaat

SEQ ID NO: 7420 - DNA, 23 bp, Artificial Sequence
  human ApoB siRNA sequence
ataaaagattactttgagaaatt

SEQ ID NO: 7421 - DNA, 23 bp, Artificial Sequence
  human ApoB siRNA sequence
taaaagattactttgagaaattg

SEQ ID NO: 7422 - DNA, 23 bp, Artificial Sequence
  human ApoB siRNA sequence
aaaagattactttgagaaattgg

SEQ ID NO: 7423 - DNA, 23 bp, Artificial Sequence
  human ApoB siRNA sequence
aaagattactttgagaaattggt

SEQ ID NO: 7424 - DNA, 23 bp, Artificial Sequence
  human ApoB siRNA sequence
aagattactttgagaaattggtt

SEQ ID NO: 7425 - DNA, 23 bp, Artificial Sequence
  human ApoB siRNA sequence
agattactttgagaaattggttg

SEQ ID NO: 7426 - DNA, 23 bp, Artificial Sequence
  human ApoB siRNA sequence
gattactttgagaaattggttgg

SEQ ID NO: 7427 - DNA, 23 bp, Artificial Sequence
  human ApoB siRNA sequence
attactttgagaaattggttgga

SEQ ID NO: 7428 - DNA, 23 bp, Artificial Sequence
  human ApoB siRNA sequence
ttactttgagaaattggttggat

SEQ ID NO: 7429 - DNA, 23 bp, Artificial Sequence
  human ApoB siRNA sequence
tactttgagaaattggttggatt

SEQ ID NO: 7430 - DNA, 23 bp, Artificial Sequence
  human ApoB siRNA sequence
actttgagaaattggttggattt

SEQ ID NO: 7431 - DNA, 23 bp, Artificial Sequence
  human ApoB siRNA sequence
ctttgagaaattggttggattta

SEQ ID NO: 7432 - DNA, 23 bp, Artificial Sequence
  human ApoB siRNA sequence
tttgagaaattggttggatttat

SEQ ID NO: 7433 - DNA, 23 bp, Artificial Sequence
  human ApoB siRNA sequence
ttgagaaattggttggatttatt

SEQ ID NO: 7434 - DNA, 23 bp, Artificial Sequence
  human ApoB siRNA sequence
tgagaaattggttggatttattg

SEQ ID NO: 7435 - DNA, 23 bp, Artificial Sequence
  human ApoB siRNA sequence
gagaaattggttggatttattga

SEQ ID NO: 7436 - DNA, 23 bp, Artificial Sequence
  human ApoB siRNA sequence
agaaattggttggatttattgat

SEQ ID NO: 7437 - DNA, 23 bp, Artificial Sequence
  human ApoB siRNA sequence
gaaattggttggatttattgatg

SEQ ID NO: 7438 - DNA, 23 bp, Artificial Sequence
  human ApoB siRNA sequence
aaattggttggatttattgatga

SEQ ID NO: 7439 - DNA, 23 bp, Artificial Sequence
  human ApoB siRNA sequence
aattggttggatttattgatgat

SEQ ID NO: 7440 - DNA, 23 bp, Artificial Sequence
  human ApoB siRNA sequence
attggttggatttattgatgatg

SEQ ID NO: 7441 - DNA, 23 bp, Artificial Sequence
  human ApoB siRNA sequence
ttggttggatttattgatgatgc

SEQ ID NO: 7442 - DNA, 23 bp, Artificial Sequence
  human ApoB siRNA sequence
tggttggatttattgatgatgct

SEQ ID NO: 7443 - DNA, 23 bp, Artificial Sequence
  human ApoB siRNA sequence
ggttggatttattgatgatgctg

SEQ ID NO: 7444 - DNA, 23 bp, Artificial Sequence
  human ApoB siRNA sequence
gttggatttattgatgatgctgt

SEQ ID NO: 7445 - DNA, 23 bp, Artificial Sequence
  human ApoB siRNA sequence
ttggatttattgatgatgctgtg

SEQ ID NO: 7446 - DNA, 23 bp, Artificial Sequence
  human ApoB siRNA sequence
tggatttattgatgatgctgtga

SEQ ID NO: 7447 - DNA, 23 bp, Artificial Sequence
  human ApoB siRNA sequence
ggatttattgatgatgctgtgaa

SEQ ID NO: 7448 - DNA, 23 bp, Artificial Sequence
  human ApoB siRNA sequence
gatttattgatgatgctgtgaag

SEQ ID NO: 7449 - DNA, 23 bp, Artificial Sequence
  human ApoB siRNA sequence
atttattgatgatgctgtgaaga

SEQ ID NO: 7450 - DNA, 23 bp, Artificial Sequence
  human ApoB siRNA sequence
tttattgatgatgctgtgaagaa

SEQ ID NO: 7451 - DNA, 23 bp, Artificial Sequence
  human ApoB siRNA sequence
ttattgatgatgctgtgaagaag

SEQ ID NO: 7452 - DNA, 23 bp, Artificial Sequence
  human ApoB siRNA sequence
tattgatgatgctgtgaagaagc

SEQ ID NO: 7453 - DNA, 23 bp, Artificial Sequence
  human ApoB siRNA sequence
attgatgatgctgtgaagaagct

SEQ ID NO: 7454 - DNA, 23 bp, Artificial Sequence
  human ApoB siRNA sequence
ttgatgatgctgtgaagaagctt

SEQ ID NO: 7455 - DNA, 23 bp, Artificial Sequence
  human ApoB siRNA sequence
tgatgatgctgtgaagaagctta

SEQ ID NO: 7456 - DNA, 23 bp, Artificial Sequence
  human ApoB siRNA sequence
gatgatgctgtgaagaagcttaa

SEQ ID NO: 7457 - DNA, 23 bp, Artificial Sequence
  human ApoB siRNA sequence
atgatgctgtgaagaagcttaat

SEQ ID NO: 7458 - DNA, 23 bp, Artificial Sequence
  human ApoB siRNA sequence
tgatgctgtgaagaagcttaatg

SEQ ID NO: 7459 - DNA, 23 bp, Artificial Sequence
  human ApoB siRNA sequence
gatgctgtgaagaagcttaatga

SEQ ID NO: 7460 - DNA, 23 bp, Artificial Sequence
  human ApoB siRNA sequence
atgctgtgaagaagcttaatgaa

SEQ ID NO: 7461 - DNA, 23 bp, Artificial Sequence
  human ApoB siRNA sequence
tgctgtgaagaagcttaatgaat

SEQ ID NO: 7462 - DNA, 23 bp, Artificial Sequence
  human ApoB siRNA sequence
gctgtgaagaagcttaatgaatt

SEQ ID NO: 7463 - DNA, 23 bp, Artificial Sequence
  human ApoB siRNA sequence
ctgtgaagaagcttaatgaatta

SEQ ID NO: 7464 - DNA, 23 bp, Artificial Sequence
  human ApoB siRNA sequence
tgtgaagaagcttaatgaattat

SEQ ID NO: 7465 - DNA, 23 bp, Artificial Sequence
  human ApoB siRNA sequence
gtgaagaagcttaatgaattatc

SEQ ID NO: 7466 - DNA, 23 bp, Artificial Sequence
  human ApoB siRNA sequence
tgaagaagcttaatgaattatct

SEQ ID NO: 7467 - DNA, 23 bp, Artificial Sequence
  human ApoB siRNA sequence
gaagaagcttaatgaattatctt

SEQ ID NO: 7468 - DNA, 23 bp, Artificial Sequence
  human ApoB siRNA sequence
aagaagcttaatgaattatcttt

SEQ ID NO: 7469 - DNA, 23 bp, Artificial Sequence
  human ApoB siRNA sequence
agaagcttaatgaattatctttt

SEQ ID NO: 7470 - DNA, 23 bp, Artificial Sequence
  human ApoB siRNA sequence
gaagcttaatgaattatctttta

SEQ ID NO: 7471 - DNA, 23 bp, Artificial Sequence
  human ApoB siRNA sequence
aagcttaatgaattatcttttaa

SEQ ID NO: 7472 - DNA, 23 bp, Artificial Sequence
  human ApoB siRNA sequence
agcttaatgaattatcttttaaa

SEQ ID NO: 7473 - DNA, 23 bp, Artificial Sequence
  human ApoB siRNA sequence
gcttaatgaattatcttttaaaa

SEQ ID NO: 7474 - DNA, 23 bp, Artificial Sequence
  human ApoB siRNA sequence
cttaatgaattatcttttaaaac

SEQ ID NO: 7475 - DNA, 23 bp, Artificial Sequence
  human ApoB siRNA sequence
ttaatgaattatcttttaaaaca

SEQ ID NO: 7476 - DNA, 23 bp, Artificial Sequence
  human ApoB siRNA sequence
taatgaattatcttttaaaacat

SEQ ID NO: 7477 - DNA, 23 bp, Artificial Sequence
  human ApoB siRNA sequence
aatgaattatcttttaaaacatt

SEQ ID NO: 7478 - DNA, 23 bp, Artificial Sequence
  human ApoB siRNA sequence
atgaattatcttttaaaacattc

SEQ ID NO: 7479 - DNA, 23 bp, Artificial Sequence
  human ApoB siRNA sequence
tgaattatcttttaaaacattca

SEQ ID NO: 7480 - DNA, 23 bp, Artificial Sequence
  human ApoB siRNA sequence
gaattatcttttaaaacattcat

SEQ ID NO: 7481 - DNA, 23 bp, Artificial Sequence
  human ApoB siRNA sequence
aattatcttttaaaacattcatt

SEQ ID NO: 7482 - DNA, 23 bp, Artificial Sequence
  human ApoB siRNA sequence
attatcttttaaaacattcattg

SEQ ID NO: 7483 - DNA, 23 bp, Artificial Sequence
  human ApoB siRNA sequence
ttatcttttaaaacattcattga

SEQ ID NO: 7484 - DNA, 23 bp, Artificial Sequence
  human ApoB siRNA sequence
tatcttttaaaacattcattgaa

SEQ ID NO: 7485 - DNA, 23 bp, Artificial Sequence
  human ApoB siRNA sequence
atcttttaaaacattcattgaag

SEQ ID NO: 7486 - DNA, 23 bp, Artificial Sequence
  human ApoB siRNA sequence
tcttttaaaacattcattgaaga

SEQ ID NO: 7487 - DNA, 23 bp, Artificial Sequence
  human ApoB siRNA sequence
cttttaaaacattcattgaagat

SEQ ID NO: 7488 - DNA, 23 bp, Artificial Sequence
  human ApoB siRNA sequence
ttttaaaacattcattgaagatg

SEQ ID NO: 7489 - DNA, 23 bp, Artificial Sequence
  human ApoB siRNA sequence
tttaaaacattcattgaagatgt

SEQ ID NO: 7490 - DNA, 23 bp, Artificial Sequence
  human ApoB siRNA sequence
ttaaaacattcattgaagatgtt

SEQ ID NO: 7491 - DNA, 23 bp, Artificial Sequence
  human ApoB siRNA sequence
taaaacattcattgaagatgtta

SEQ ID NO: 7492 - DNA, 23 bp, Artificial Sequence
  human ApoB siRNA sequence
aaaacattcattgaagatgttaa

SEQ ID NO: 7493 - DNA, 23 bp, Artificial Sequence
  human ApoB siRNA sequence
aaacattcattgaagatgttaac

SEQ ID NO: 7494 - DNA, 23 bp, Artificial Sequence
  human ApoB siRNA sequence
aacattcattgaagatgttaaca

SEQ ID NO: 7495 - DNA, 23 bp, Artificial Sequence
  human ApoB siRNA sequence
acattcattgaagatgttaacaa

SEQ ID NO: 7496 - DNA, 23 bp, Artificial Sequence
  human ApoB siRNA sequence
cattcattgaagatgttaacaaa

SEQ ID NO: 7497 - DNA, 23 bp, Artificial Sequence
  human ApoB siRNA sequence
attcattgaagatgttaacaaat

SEQ ID NO: 7498 - DNA, 23 bp, Artificial Sequence
  human ApoB siRNA sequence
ttcattgaagatgttaacaaatt

SEQ ID NO: 7499 - DNA, 23 bp, Artificial Sequence
  human ApoB siRNA sequence
tcattgaagatgttaacaaattc

SEQ ID NO: 7500 - DNA, 23 bp, Artificial Sequence
  human ApoB siRNA sequence
cattgaagatgttaacaaattcc

SEQ ID NO: 7501 - DNA, 23 bp, Artificial Sequence
  human ApoB siRNA sequence
attgaagatgttaacaaattcct

SEQ ID NO: 7502 - DNA, 23 bp, Artificial Sequence
  human ApoB siRNA sequence
ttgaagatgttaacaaattcctt

SEQ ID NO: 7503 - DNA, 23 bp, Artificial Sequence
  human ApoB siRNA sequence
tgaagatgttaacaaattccttg

SEQ ID NO: 7504 - DNA, 23 bp, Artificial Sequence
  human ApoB siRNA sequence
gaagatgttaacaaattccttga

SEQ ID NO: 7505 - DNA, 23 bp, Artificial Sequence
  human ApoB siRNA sequence
aagatgttaacaaattccttgac

SEQ ID NO: 7506 - DNA, 23 bp, Artificial Sequence
  human ApoB siRNA sequence
agatgttaacaaattccttgaca

SEQ ID NO: 7507 - DNA, 23 bp, Artificial Sequence
  human ApoB siRNA sequence
gatgttaacaaattccttgacat

SEQ ID NO: 7508 - DNA, 23 bp, Artificial Sequence
  human ApoB siRNA sequence
atgttaacaaattccttgacatg

SEQ ID NO: 7509 - DNA, 23 bp, Artificial Sequence
  human ApoB siRNA sequence
tgttaacaaattccttgacatgt

SEQ ID NO: 7510 - DNA, 23 bp, Artificial Sequence
  human ApoB siRNA sequence
gttaacaaattccttgacatgtt

SEQ ID NO: 7511 - DNA, 23 bp, Artificial Sequence
  human ApoB siRNA sequence
ttaacaaattccttgacatgttg

SEQ ID NO: 7512 - DNA, 23 bp, Artificial Sequence
  human ApoB siRNA sequence
taacaaattccttgacatgttga

SEQ ID NO: 7513 - DNA, 23 bp, Artificial Sequence
  human ApoB siRNA sequence
aacaaattccttgacatgttgat

SEQ ID NO: 7514 - DNA, 23 bp, Artificial Sequence
  human ApoB siRNA sequence
acaaattccttgacatgttgata

SEQ ID NO: 7515 - DNA, 23 bp, Artificial Sequence
  human ApoB siRNA sequence
caaattccttgacatgttgataa

SEQ ID NO: 7516 - DNA, 23 bp, Artificial Sequence
  human ApoB siRNA sequence
aaattccttgacatgttgataaa

SEQ ID NO: 7517 - DNA, 23 bp, Artificial Sequence
  human ApoB siRNA sequence
aattccttgacatgttgataaag

SEQ ID NO: 7518 - DNA, 23 bp, Artificial Sequence
  human ApoB siRNA sequence
attccttgacatgttgataaaga

SEQ ID NO: 7519 - DNA, 23 bp, Artificial Sequence
  human ApoB siRNA sequence
ttccttgacatgttgataaagaa

SEQ ID NO: 7520 - DNA, 23 bp, Artificial Sequence
  human ApoB siRNA sequence
tccttgacatgttgataaagaaa

SEQ ID NO: 7521 - DNA, 23 bp, Artificial Sequence
  human ApoB siRNA sequence
ccttgacatgttgataaagaaat

SEQ ID NO: 7522 - DNA, 23 bp, Artificial Sequence
  human ApoB siRNA sequence
cttgacatgttgataaagaaatt

SEQ ID NO: 7523 - DNA, 23 bp, Artificial Sequence
  human ApoB siRNA sequence
ttgacatgttgataaagaaatta

SEQ ID NO: 7524 - DNA, 23 bp, Artificial Sequence
  human ApoB siRNA sequence
tgacatgttgataaagaaattaa

SEQ ID NO: 7525 - DNA, 23 bp, Artificial Sequence
  human ApoB siRNA sequence
gacatgttgataaagaaattaaa

SEQ ID NO: 7526 - DNA, 23 bp, Artificial Sequence
  human ApoB siRNA sequence
acatgttgataaagaaattaaag

SEQ ID NO: 7527 - DNA, 23 bp, Artificial Sequence
  human ApoB siRNA sequence
catgttgataaagaaattaaagt

SEQ ID NO: 7528 - DNA, 23 bp, Artificial Sequence
  human ApoB siRNA sequence
atgttgataaagaaattaaagtc

SEQ ID NO: 7529 - DNA, 23 bp, Artificial Sequence
  human ApoB siRNA sequence
tgttgataaagaaattaaagtca

SEQ ID NO: 7530 - DNA, 23 bp, Artificial Sequence
  human ApoB siRNA sequence
gttgataaagaaattaaagtcat

SEQ ID NO: 7531 - DNA, 23 bp, Artificial Sequence
  human ApoB siRNA sequence
ttgataaagaaattaaagtcatt

SEQ ID NO: 7532 - DNA, 23 bp, Artificial Sequence
  human ApoB siRNA sequence
tgataaagaaattaaagtcattt

SEQ ID NO: 7533 - DNA, 23 bp, Artificial Sequence
  human ApoB siRNA sequence
gataaagaaattaaagtcatttg

SEQ ID NO: 7534 - DNA, 23 bp, Artificial Sequence
  human ApoB siRNA sequence
ataaagaaattaaagtcatttga

SEQ ID NO: 7535 - DNA, 23 bp, Artificial Sequence
  human ApoB siRNA sequence
taaagaaattaaagtcatttgat

SEQ ID NO: 7536 - DNA, 23 bp, Artificial Sequence
  human ApoB siRNA sequence
aaagaaattaaagtcatttgatt

SEQ ID NO: 7537 - DNA, 23 bp, Artificial Sequence
  human ApoB siRNA sequence
aagaaattaaagtcatttgatta

SEQ ID NO: 7538 - DNA, 23 bp, Artificial Sequence
  human ApoB siRNA sequence
agaaattaaagtcatttgattac

SEQ ID NO: 7539 - DNA, 23 bp, Artificial Sequence
  human ApoB siRNA sequence
gaaattaaagtcatttgattacc

SEQ ID NO: 7540 - DNA, 23 bp, Artificial Sequence
  human ApoB siRNA sequence
aaattaaagtcatttgattacca

SEQ ID NO: 7541 - DNA, 23 bp, Artificial Sequence
  human ApoB siRNA sequence
aattaaagtcatttgattaccac

SEQ ID NO: 7542 - DNA, 23 bp, Artificial Sequence
  human ApoB siRNA sequence
attaaagtcatttgattaccacc

SEQ ID NO: 7543 - DNA, 23 bp, Artificial Sequence
  human ApoB siRNA sequence
ttaaagtcatttgattaccacca

SEQ ID NO: 7544 - DNA, 23 bp, Artificial Sequence
  human ApoB siRNA sequence
taaagtcatttgattaccaccag

SEQ ID NO: 7545 - DNA, 23 bp, Artificial Sequence
  human ApoB siRNA sequence
aaagtcatttgattaccaccagt

SEQ ID NO: 7546 - DNA, 23 bp, Artificial Sequence
  human ApoB siRNA sequence
aagtcatttgattaccaccagtt

SEQ ID NO: 7547 - DNA, 23 bp, Artificial Sequence
  human ApoB siRNA sequence
agtcatttgattaccaccagttt

SEQ ID NO: 7548 - DNA, 23 bp, Artificial Sequence
  human ApoB siRNA sequence
gtcatttgattaccaccagtttg

SEQ ID NO: 7549 - DNA, 23 bp, Artificial Sequence
  human ApoB siRNA sequence
tcatttgattaccaccagtttgt

SEQ ID NO: 7550 - DNA, 23 bp, Artificial Sequence
  human ApoB siRNA sequence
catttgattaccaccagtttgta

SEQ ID NO: 7551 - DNA, 23 bp, Artificial Sequence
  human ApoB siRNA sequence
atttgattaccaccagtttgtag

SEQ ID NO: 7552 - DNA, 23 bp, Artificial Sequence
  human ApoB siRNA sequence
tttgattaccaccagtttgtaga

SEQ ID NO: 7553 - DNA, 23 bp, Artificial Sequence
  human ApoB siRNA sequence
ttgattaccaccagtttgtagat

SEQ ID NO: 7554 - DNA, 23 bp, Artificial Sequence
  human ApoB siRNA sequence
tgattaccaccagtttgtagatg

SEQ ID NO: 7555 - DNA, 23 bp, Artificial Sequence
  human ApoB siRNA sequence
gattaccaccagtttgtagatga

SEQ ID NO: 7556 - DNA, 23 bp, Artificial Sequence
  human ApoB siRNA sequence
attaccaccagtttgtagatgaa

SEQ ID NO: 7557 - DNA, 23 bp, Artificial Sequence
  human ApoB siRNA sequence
ttaccaccagtttgtagatgaaa

SEQ ID NO: 7558 - DNA, 23 bp, Artificial Sequence
  human ApoB siRNA sequence
taccaccagtttgtagatgaaac

SEQ ID NO: 7559 - DNA, 23 bp, Artificial Sequence
  human ApoB siRNA sequence
accaccagtttgtagatgaaacc

SEQ ID NO: 7560 - DNA, 23 bp, Artificial Sequence
  human ApoB siRNA sequence
ccaccagtttgtagatgaaacca

SEQ ID NO: 7561 - DNA, 23 bp, Artificial Sequence
  human ApoB siRNA sequence
caccagtttgtagatgaaaccaa

SEQ ID NO: 7562 - DNA, 23 bp, Artificial Sequence
  human ApoB siRNA sequence
accagtttgtagatgaaaccaat

SEQ ID NO: 7563 - DNA, 23 bp, Artificial Sequence
  human ApoB siRNA sequence
ccagtttgtagatgaaaccaatg

SEQ ID NO: 7564 - DNA, 23 bp, Artificial Sequence
  human ApoB siRNA sequence
cagtttgtagatgaaaccaatga

SEQ ID NO: 7565 - DNA, 23 bp, Artificial Sequence
  human ApoB siRNA sequence
agtttgtagatgaaaccaatgac

SEQ ID NO: 7566 - DNA, 23 bp, Artificial Sequence
  human ApoB siRNA sequence
gtttgtagatgaaaccaatgaca

SEQ ID NO: 7567 - DNA, 23 bp, Artificial Sequence
  human ApoB siRNA sequence
tttgtagatgaaaccaatgacaa

SEQ ID NO: 7568 - DNA, 23 bp, Artificial Sequence
  human ApoB siRNA sequence
ttgtagatgaaaccaatgacaaa

SEQ ID NO: 7569 - DNA, 23 bp, Artificial Sequence
  human ApoB siRNA sequence
tgtagatgaaaccaatgacaaaa

SEQ ID NO: 7570 - DNA, 23 bp, Artificial Sequence
  human ApoB siRNA sequence
gtagatgaaaccaatgacaaaat

SEQ ID NO: 7571 - DNA, 23 bp, Artificial Sequence
  human ApoB siRNA sequence
tagatgaaaccaatgacaaaatc

SEQ ID NO: 7572 - DNA, 23 bp, Artificial Sequence
  human ApoB siRNA sequence
agatgaaaccaatgacaaaatcc

SEQ ID NO: 7573 - DNA, 23 bp, Artificial Sequence
  human ApoB siRNA sequence
gatgaaaccaatgacaaaatccg

SEQ ID NO: 7574 - DNA, 23 bp, Artificial Sequence
  human ApoB siRNA sequence
atgaaaccaatgacaaaatccgt

SEQ ID NO: 7575 - DNA, 23 bp, Artificial Sequence
  human ApoB siRNA sequence
tgaaaccaatgacaaaatccgtg

SEQ ID NO: 7576 - DNA, 23 bp, Artificial Sequence
  human ApoB siRNA sequence
gaaaccaatgacaaaatccgtga

SEQ ID NO: 7577 - DNA, 23 bp, Artificial Sequence
  human ApoB siRNA sequence
aaaccaatgacaaaatccgtgag

SEQ ID NO: 7578 - DNA, 23 bp, Artificial Sequence
  human ApoB siRNA sequence
aaccaatgacaaaatccgtgagg

SEQ ID NO: 7579 - DNA, 23 bp, Artificial Sequence
  human ApoB siRNA sequence
accaatgacaaaatccgtgaggt

SEQ ID NO: 7580 - DNA, 23 bp, Artificial Sequence
  human ApoB siRNA sequence
ccaatgacaaaatccgtgaggtg

SEQ ID NO: 7581 - DNA, 23 bp, Artificial Sequence
  human ApoB siRNA sequence
caatgacaaaatccgtgaggtga

SEQ ID NO: 7582 - DNA, 23 bp, Artificial Sequence
  human ApoB siRNA sequence
aatgacaaaatccgtgaggtgac

SEQ ID NO: 7583 - DNA, 23 bp, Artificial Sequence
  human ApoB siRNA sequence
atgacaaaatccgtgaggtgact

SEQ ID NO: 7584 - DNA, 23 bp, Artificial Sequence
  human ApoB siRNA sequence
tgacaaaatccgtgaggtgactc

SEQ ID NO: 7585 - DNA, 23 bp, Artificial Sequence
  human ApoB siRNA sequence
gacaaaatccgtgaggtgactca

SEQ ID NO: 7586 - DNA, 23 bp, Artificial Sequence
  human ApoB siRNA sequence
acaaaatccgtgaggtgactcag

SEQ ID NO: 7587 - DNA, 23 bp, Artificial Sequence
  human ApoB siRNA sequence
caaaatccgtgaggtgactcaga

SEQ ID NO: 7588 - DNA, 23 bp, Artificial Sequence
  human ApoB siRNA sequence
aaaatccgtgaggtgactcagag

SEQ ID NO: 7589 - DNA, 23 bp, Artificial Sequence
  human ApoB siRNA sequence
aaatccgtgaggtgactcagaga

SEQ ID NO: 7590 - DNA, 23 bp, Artificial Sequence
  human ApoB siRNA sequence
aatccgtgaggtgactcagagac

SEQ ID NO: 7591 - DNA, 23 bp, Artificial Sequence
  human ApoB siRNA sequence
atccgtgaggtgactcagagact

SEQ ID NO: 7592 - DNA, 23 bp, Artificial Sequence
  human ApoB siRNA sequence
tccgtgaggtgactcagagactc

SEQ ID NO: 7593 - DNA, 23 bp, Artificial Sequence
  human ApoB siRNA sequence
ccgtgaggtgactcagagactca

SEQ ID NO: 7594 - DNA, 23 bp, Artificial Sequence
  human ApoB siRNA sequence
cgtgaggtgactcagagactcaa

SEQ ID NO: 7595 - DNA, 23 bp, Artificial Sequence
  human ApoB siRNA sequence
gtgaggtgactcagagactcaat

SEQ ID NO: 7596 - DNA, 23 bp, Artificial Sequence
  human ApoB siRNA sequence
tgaggtgactcagagactcaatg

SEQ ID NO: 7597 - DNA, 23 bp, Artificial Sequence
  human ApoB siRNA sequence
gaggtgactcagagactcaatgg

SEQ ID NO: 7598 - DNA, 23 bp, Artificial Sequence
  human ApoB siRNA sequence
aggtgactcagagactcaatggt

SEQ ID NO: 7599 - DNA, 23 bp, Artificial Sequence
  human ApoB siRNA sequence
ggtgactcagagactcaatggtg

SEQ ID NO: 7600 - DNA, 23 bp, Artificial Sequence
  human ApoB siRNA sequence
gtgactcagagactcaatggtga

SEQ ID NO: 7601 - DNA, 23 bp, Artificial Sequence
  human ApoB siRNA sequence
tgactcagagactcaatggtgaa

SEQ ID NO: 7602 - DNA, 23 bp, Artificial Sequence
  human ApoB siRNA sequence
gactcagagactcaatggtgaaa

SEQ ID NO: 7603 - DNA, 23 bp, Artificial Sequence
  human ApoB siRNA sequence
actcagagactcaatggtgaaat

SEQ ID NO: 7604 - DNA, 23 bp, Artificial Sequence
  human ApoB siRNA sequence
ctcagagactcaatggtgaaatt

SEQ ID NO: 7605 - DNA, 23 bp, Artificial Sequence
  human ApoB siRNA sequence
tcagagactcaatggtgaaattc

SEQ ID NO: 7606 - DNA, 23 bp, Artificial Sequence
  human ApoB siRNA sequence
cagagactcaatggtgaaattca

SEQ ID NO: 7607 - DNA, 23 bp, Artificial Sequence
  human ApoB siRNA sequence
agagactcaatggtgaaattcag

SEQ ID NO: 7608 - DNA, 23 bp, Artificial Sequence
  human ApoB siRNA sequence
gagactcaatggtgaaattcagg

SEQ ID NO: 7609 - DNA, 23 bp, Artificial Sequence
  human ApoB siRNA sequence
agactcaatggtgaaattcaggc

SEQ ID NO: 7610 - DNA, 23 bp, Artificial Sequence
  human ApoB siRNA sequence
gactcaatggtgaaattcaggct

SEQ ID NO: 7611 - DNA, 23 bp, Artificial Sequence
  human ApoB siRNA sequence
actcaatggtgaaattcaggctc

SEQ ID NO: 7612 - DNA, 23 bp, Artificial Sequence
  human ApoB siRNA sequence
ctcaatggtgaaattcaggctct

SEQ ID NO: 7613 - DNA, 23 bp, Artificial Sequence
  human ApoB siRNA sequence
tcaatggtgaaattcaggctctg

SEQ ID NO: 7614 - DNA, 23 bp, Artificial Sequence
  human ApoB siRNA sequence
caatggtgaaattcaggctctgg

SEQ ID NO: 7615 - DNA, 23 bp, Artificial Sequence
  human ApoB siRNA sequence
aatggtgaaattcaggctctgga

SEQ ID NO: 7616 - DNA, 23 bp, Artificial Sequence
  human ApoB siRNA sequence
atggtgaaattcaggctctggaa

SEQ ID NO: 7617 - DNA, 23 bp, Artificial Sequence
  human ApoB siRNA sequence
tggtgaaattcaggctctggaac

SEQ ID NO: 7618 - DNA, 23 bp, Artificial Sequence
  human ApoB siRNA sequence
ggtgaaattcaggctctggaact

SEQ ID NO: 7619 - DNA, 23 bp, Artificial Sequence
  human ApoB siRNA sequence
gtgaaattcaggctctggaacta

SEQ ID NO: 7620 - DNA, 23 bp, Artificial Sequence
  human ApoB siRNA sequence
tgaaattcaggctctggaactac

SEQ ID NO: 7621 - DNA, 23 bp, Artificial Sequence
  human ApoB siRNA sequence
gaaattcaggctctggaactacc

SEQ ID NO: 7622 - DNA, 23 bp, Artificial Sequence
  human ApoB siRNA sequence
aaattcaggctctggaactacca

SEQ ID NO: 7623 - DNA, 23 bp, Artificial Sequence
  human ApoB siRNA sequence
aattcaggctctggaactaccac

SEQ ID NO: 7624 - DNA, 23 bp, Artificial Sequence
  human ApoB siRNA sequence
attcaggctctggaactaccaca

SEQ ID NO: 7625 - DNA, 23 bp, Artificial Sequence
  human ApoB siRNA sequence
ttcaggctctggaactaccacaa

SEQ ID NO: 7626 - DNA, 23 bp, Artificial Sequence
  human ApoB siRNA sequence
tcaggctctggaactaccacaaa

SEQ ID NO: 7627 - DNA, 23 bp, Artificial Sequence
  human ApoB siRNA sequence
caggctctggaactaccacaaaa

SEQ ID NO: 7628 - DNA, 23 bp, Artificial Sequence
  human ApoB siRNA sequence
aggctctggaactaccacaaaaa

SEQ ID NO: 7629 - DNA, 23 bp, Artificial Sequence
  human ApoB siRNA sequence
ggctctggaactaccacaaaaag

SEQ ID NO: 7630 - DNA, 23 bp, Artificial Sequence
  human ApoB siRNA sequence
gctctggaactaccacaaaaagc

SEQ ID NO: 7631 - DNA, 23 bp, Artificial Sequence
  human ApoB siRNA sequence
ctctggaactaccacaaaaagct

SEQ ID NO: 7632 - DNA, 23 bp, Artificial Sequence
  human ApoB siRNA sequence
tctggaactaccacaaaaagctg

SEQ ID NO: 7633 - DNA, 23 bp, Artificial Sequence
  human ApoB siRNA sequence
ctggaactaccacaaaaagctga

SEQ ID NO: 7634 - DNA, 23 bp, Artificial Sequence
  human ApoB siRNA sequence
tggaactaccacaaaaagctgaa

SEQ ID NO: 7635 - DNA, 23 bp, Artificial Sequence
  human ApoB siRNA sequence
ggaactaccacaaaaagctgaag

SEQ ID NO: 7636 - DNA, 23 bp, Artificial Sequence
  human ApoB siRNA sequence
gaactaccacaaaaagctgaagc

SEQ ID NO: 7637 - DNA, 23 bp, Artificial Sequence
  human ApoB siRNA sequence
aactaccacaaaaagctgaagca

SEQ ID NO: 7638 - DNA, 23 bp, Artificial Sequence
  human ApoB siRNA sequence
actaccacaaaaagctgaagcat

SEQ ID NO: 7639 - DNA, 23 bp, Artificial Sequence
  human ApoB siRNA sequence
ctaccacaaaaagctgaagcatt

SEQ ID NO: 7640 - DNA, 23 bp, Artificial Sequence
  human ApoB siRNA sequence
taccacaaaaagctgaagcatta

SEQ ID NO: 7641 - DNA, 23 bp, Artificial Sequence
  human ApoB siRNA sequence
accacaaaaagctgaagcattaa

SEQ ID NO: 7642 - DNA, 23 bp, Artificial Sequence
  human ApoB siRNA sequence
ccacaaaaagctgaagcattaaa

SEQ ID NO: 7643 - DNA, 23 bp, Artificial Sequence
  human ApoB siRNA sequence
cacaaaaagctgaagcattaaaa

SEQ ID NO: 7644 - DNA, 23 bp, Artificial Sequence
  human ApoB siRNA sequence
acaaaaagctgaagcattaaaac

SEQ ID NO: 7645 - DNA, 23 bp, Artificial Sequence
  human ApoB siRNA sequence
caaaaagctgaagcattaaaact

SEQ ID NO: 7646 - DNA, 23 bp, Artificial Sequence
  human ApoB siRNA sequence
aaaaagctgaagcattaaaactg

SEQ ID NO: 7647 - DNA, 23 bp, Artificial Sequence
  human ApoB siRNA sequence
aaaagctgaagcattaaaactgt

SEQ ID NO: 7648 - DNA, 23 bp, Artificial Sequence
  human ApoB siRNA sequence
aaagctgaagcattaaaactgtt

SEQ ID NO: 7649 - DNA, 23 bp, Artificial Sequence
  human ApoB siRNA sequence
aagctgaagcattaaaactgttt

SEQ ID NO: 7650 - DNA, 23 bp, Artificial Sequence
  human ApoB siRNA sequence
agctgaagcattaaaactgtttt

SEQ ID NO: 7651 - DNA, 23 bp, Artificial Sequence
  human ApoB siRNA sequence
gctgaagcattaaaactgttttt

SEQ ID NO: 7652 - DNA, 23 bp, Artificial Sequence
  human ApoB siRNA sequence
ctgaagcattaaaactgttttta

SEQ ID NO: 7653 - DNA, 23 bp, Artificial Sequence
  human ApoB siRNA sequence
tgaagcattaaaactgtttttag

SEQ ID NO: 7654 - DNA, 23 bp, Artificial Sequence
  human ApoB siRNA sequence
gaagcattaaaactgtttttaga

SEQ ID NO: 7655 - DNA, 23 bp, Artificial Sequence
  human ApoB siRNA sequence
aagcattaaaactgtttttagag

SEQ ID NO: 7656 - DNA, 23 bp, Artificial Sequence
  human ApoB siRNA sequence
agcattaaaactgtttttagagg

SEQ ID NO: 7657 - DNA, 23 bp, Artificial Sequence
  human ApoB siRNA sequence
gcattaaaactgtttttagagga

SEQ ID NO: 7658 - DNA, 23 bp, Artificial Sequence
  human ApoB siRNA sequence
cattaaaactgtttttagaggaa

SEQ ID NO: 7659 - DNA, 23 bp, Artificial Sequence
  human ApoB siRNA sequence
attaaaactgtttttagaggaaa

SEQ ID NO: 7660 - DNA, 23 bp, Artificial Sequence
  human ApoB siRNA sequence
ttaaaactgtttttagaggaaac

SEQ ID NO: 7661 - DNA, 23 bp, Artificial Sequence
  human ApoB siRNA sequence
taaaactgtttttagaggaaacc

SEQ ID NO: 7662 - DNA, 23 bp, Artificial Sequence
  human ApoB siRNA sequence
aaaactgtttttagaggaaacca

SEQ ID NO: 7663 - DNA, 23 bp, Artificial Sequence
  human ApoB siRNA sequence
aaactgtttttagaggaaaccaa

SEQ ID NO: 7664 - DNA, 23 bp, Artificial Sequence
  human ApoB siRNA sequence
aactgtttttagaggaaaccaag

SEQ ID NO: 7665 - DNA, 23 bp, Artificial Sequence
  human ApoB siRNA sequence
actgtttttagaggaaaccaagg

SEQ ID NO: 7666 - DNA, 23 bp, Artificial Sequence
  human ApoB siRNA sequence
ctgtttttagaggaaaccaaggc

SEQ ID NO: 7667 - DNA, 23 bp, Artificial Sequence
  human ApoB siRNA sequence
tgtttttagaggaaaccaaggcc

SEQ ID NO: 7668 - DNA, 23 bp, Artificial Sequence
  human ApoB siRNA sequence
gtttttagaggaaaccaaggcca

SEQ ID NO: 7669 - DNA, 23 bp, Artificial Sequence
  human ApoB siRNA sequence
tttttagaggaaaccaaggccac

SEQ ID NO: 7670 - DNA, 23 bp, Artificial Sequence
  human ApoB siRNA sequence
ttttagaggaaaccaaggccaca

SEQ ID NO: 7671 - DNA, 23 bp, Artificial Sequence
  human ApoB siRNA sequence
tttagaggaaaccaaggccacag

SEQ ID NO: 7672 - DNA, 23 bp, Artificial Sequence
  human ApoB siRNA sequence
ttagaggaaaccaaggccacagt

SEQ ID NO: 7673 - DNA, 23 bp, Artificial Sequence
  human ApoB siRNA sequence
tagaggaaaccaaggccacagtt

SEQ ID NO: 7674 - DNA, 23 bp, Artificial Sequence
  human ApoB siRNA sequence
agaggaaaccaaggccacagttg

SEQ ID NO: 7675 - DNA, 23 bp, Artificial Sequence
  human ApoB siRNA sequence
gaggaaaccaaggccacagttgc

SEQ ID NO: 7676 - DNA, 23 bp, Artificial Sequence
  human ApoB siRNA sequence
aggaaaccaaggccacagttgca

SEQ ID NO: 7677 - DNA, 23 bp, Artificial Sequence
  human ApoB siRNA sequence
ggaaaccaaggccacagttgcag

SEQ ID NO: 7678 - DNA, 23 bp, Artificial Sequence
  human ApoB siRNA sequence
gaaaccaaggccacagttgcagt

SEQ ID NO: 7679 - DNA, 23 bp, Artificial Sequence
  human ApoB siRNA sequence
aaaccaaggccacagttgcagtg

SEQ ID NO: 7680 - DNA, 23 bp, Artificial Sequence
  human ApoB siRNA sequence
aaccaaggccacagttgcagtgt

SEQ ID NO: 7681 - DNA, 23 bp, Artificial Sequence
  human ApoB siRNA sequence
accaaggccacagttgcagtgta

SEQ ID NO: 7682 - DNA, 23 bp, Artificial Sequence
  human ApoB siRNA sequence
ccaaggccacagttgcagtgtat

SEQ ID NO: 7683 - DNA, 23 bp, Artificial Sequence
  human ApoB siRNA sequence
caaggccacagttgcagtgtatc

SEQ ID NO: 7684 - DNA, 23 bp, Artificial Sequence
  human ApoB siRNA sequence
aaggccacagttgcagtgtatct

SEQ ID NO: 7685 - DNA, 23 bp, Artificial Sequence
  human ApoB siRNA sequence
aggccacagttgcagtgtatctg

SEQ ID NO: 7686 - DNA, 23 bp, Artificial Sequence
  human ApoB siRNA sequence
ggccacagttgcagtgtatctgg

SEQ ID NO: 7687 - DNA, 23 bp, Artificial Sequence
  human ApoB siRNA sequence
gccacagttgcagtgtatctgga

SEQ ID NO: 7688 - DNA, 23 bp, Artificial Sequence
  human ApoB siRNA sequence
ccacagttgcagtgtatctggaa

SEQ ID NO: 7689 - DNA, 23 bp, Artificial Sequence
  human ApoB siRNA sequence
cacagttgcagtgtatctggaaa

SEQ ID NO: 7690 - DNA, 23 bp, Artificial Sequence
  human ApoB siRNA sequence
acagttgcagtgtatctggaaag

SEQ ID NO: 7691 - DNA, 23 bp, Artificial Sequence
  human ApoB siRNA sequence
cagttgcagtgtatctggaaagc

SEQ ID NO: 7692 - DNA, 23 bp, Artificial Sequence
  human ApoB siRNA sequence
agttgcagtgtatctggaaagcc

SEQ ID NO: 7693 - DNA, 23 bp, Artificial Sequence
  human ApoB siRNA sequence
gttgcagtgtatctggaaagcct

SEQ ID NO: 7694 - DNA, 23 bp, Artificial Sequence
  human ApoB siRNA sequence
ttgcagtgtatctggaaagccta

SEQ ID NO: 7695 - DNA, 23 bp, Artificial Sequence
  human ApoB siRNA sequence
tgcagtgtatctggaaagcctac

SEQ ID NO: 7696 - DNA, 23 bp, Artificial Sequence
  human ApoB siRNA sequence
gcagtgtatctggaaagcctaca

SEQ ID NO: 7697 - DNA, 23 bp, Artificial Sequence
  human ApoB siRNA sequence
cagtgtatctggaaagcctacag

SEQ ID NO: 7698 - DNA, 23 bp, Artificial Sequence
  human ApoB siRNA sequence
agtgtatctggaaagcctacagg

SEQ ID NO: 7699 - DNA, 23 bp, Artificial Sequence
  human ApoB siRNA sequence
gtgtatctggaaagcctacagga

SEQ ID NO: 7700 - DNA, 23 bp, Artificial Sequence
  human ApoB siRNA sequence
tgtatctggaaagcctacaggac

SEQ ID NO: 7701 - DNA, 23 bp, Artificial Sequence
  human ApoB siRNA sequence
gtatctggaaagcctacaggaca

SEQ ID NO: 7702 - DNA, 23 bp, Artificial Sequence
  human ApoB siRNA sequence
tatctggaaagcctacaggacac

SEQ ID NO: 7703 - DNA, 23 bp, Artificial Sequence
  human ApoB siRNA sequence
atctggaaagcctacaggacacc

SEQ ID NO: 7704 - DNA, 23 bp, Artificial Sequence
  human ApoB siRNA sequence
tctggaaagcctacaggacacca

SEQ ID NO: 7705 - DNA, 23 bp, Artificial Sequence
  human ApoB siRNA sequence
ctggaaagcctacaggacaccaa

SEQ ID NO: 7706 - DNA, 23 bp, Artificial Sequence
  human ApoB siRNA sequence
tggaaagcctacaggacaccaaa

SEQ ID NO: 7707 - DNA, 23 bp, Artificial Sequence
  human ApoB siRNA sequence
ggaaagcctacaggacaccaaaa

SEQ ID NO: 7708 - DNA, 23 bp, Artificial Sequence
  human ApoB siRNA sequence
gaaagcctacaggacaccaaaat

SEQ ID NO: 7709 - DNA, 23 bp, Artificial Sequence
  human ApoB siRNA sequence
aaagcctacaggacaccaaaata

SEQ ID NO: 7710 - DNA, 23 bp, Artificial Sequence
  human ApoB siRNA sequence
aagcctacaggacaccaaaataa

SEQ ID NO: 7711 - DNA, 23 bp, Artificial Sequence
  human ApoB siRNA sequence
agcctacaggacaccaaaataac

SEQ ID NO: 7712 - DNA, 23 bp, Artificial Sequence
  human ApoB siRNA sequence
gcctacaggacaccaaaataacc

SEQ ID NO: 7713 - DNA, 23 bp, Artificial Sequence
  human ApoB siRNA sequence
cctacaggacaccaaaataacct

SEQ ID NO: 7714 - DNA, 23 bp, Artificial Sequence
  human ApoB siRNA sequence
ctacaggacaccaaaataacctt

SEQ ID NO: 7715 - DNA, 23 bp, Artificial Sequence
  human ApoB siRNA sequence
tacaggacaccaaaataacctta

SEQ ID NO: 7716 - DNA, 23 bp, Artificial Sequence
  human ApoB siRNA sequence
acaggacaccaaaataaccttaa

SEQ ID NO: 7717 - DNA, 23 bp, Artificial Sequence
  human ApoB siRNA sequence
caggacaccaaaataaccttaat

SEQ ID NO: 7718 - DNA, 23 bp, Artificial Sequence
  human ApoB siRNA sequence
aggacaccaaaataaccttaatc

SEQ ID NO: 7719 - DNA, 23 bp, Artificial Sequence
  human ApoB siRNA sequence
ggacaccaaaataaccttaatca

SEQ ID NO: 7720 - DNA, 23 bp, Artificial Sequence
  human ApoB siRNA sequence
gacaccaaaataaccttaatcat

SEQ ID NO: 7721 - DNA, 23 bp, Artificial Sequence
  human ApoB siRNA sequence
acaccaaaataaccttaatcatc

SEQ ID NO: 7722 - DNA, 23 bp, Artificial Sequence
  human ApoB siRNA sequence
caccaaaataaccttaatcatca

SEQ ID NO: 7723 - DNA, 23 bp, Artificial Sequence
  human ApoB siRNA sequence
accaaaataaccttaatcatcaa

SEQ ID NO: 7724 - DNA, 23 bp, Artificial Sequence
  human ApoB siRNA sequence
ccaaaataaccttaatcatcaat

SEQ ID NO: 7725 - DNA, 23 bp, Artificial Sequence
  human ApoB siRNA sequence
caaaataaccttaatcatcaatt

SEQ ID NO: 7726 - DNA, 23 bp, Artificial Sequence
  human ApoB siRNA sequence
aaaataaccttaatcatcaattg

SEQ ID NO: 7727 - DNA, 23 bp, Artificial Sequence
  human ApoB siRNA sequence
aaataaccttaatcatcaattgg

SEQ ID NO: 7728 - DNA, 23 bp, Artificial Sequence
  human ApoB siRNA sequence
aataaccttaatcatcaattggt

SEQ ID NO: 7729 - DNA, 23 bp, Artificial Sequence
  human ApoB siRNA sequence
ataaccttaatcatcaattggtt

SEQ ID NO: 7730 - DNA, 23 bp, Artificial Sequence
  human ApoB siRNA sequence
taaccttaatcatcaattggtta

SEQ ID NO: 7731 - DNA, 23 bp, Artificial Sequence
  human ApoB siRNA sequence
aaccttaatcatcaattggttac

SEQ ID NO: 7732 - DNA, 23 bp, Artificial Sequence
  human ApoB siRNA sequence
accttaatcatcaattggttaca

SEQ ID NO: 7733 - DNA, 23 bp, Artificial Sequence
  human ApoB siRNA sequence
ccttaatcatcaattggttacag

SEQ ID NO: 7734 - DNA, 23 bp, Artificial Sequence
  human ApoB siRNA sequence
cttaatcatcaattggttacagg

SEQ ID NO: 7735 - DNA, 23 bp, Artificial Sequence
  human ApoB siRNA sequence
ttaatcatcaattggttacagga

SEQ ID NO: 7736 - DNA, 23 bp, Artificial Sequence
  human ApoB siRNA sequence
taatcatcaattggttacaggag

SEQ ID NO: 7737 - DNA, 23 bp, Artificial Sequence
  human ApoB siRNA sequence
aatcatcaattggttacaggagg

SEQ ID NO: 7738 - DNA, 23 bp, Artificial Sequence
  human ApoB siRNA sequence
atcatcaattggttacaggaggc

SEQ ID NO: 7739 - DNA, 23 bp, Artificial Sequence
  human ApoB siRNA sequence
tcatcaattggttacaggaggct

SEQ ID NO: 7740 - DNA, 23 bp, Artificial Sequence
  human ApoB siRNA sequence
catcaattggttacaggaggctt

SEQ ID NO: 7741 - DNA, 23 bp, Artificial Sequence
  human ApoB siRNA sequence
atcaattggttacaggaggcttt

SEQ ID NO: 7742 - DNA, 23 bp, Artificial Sequence
  human ApoB siRNA sequence
tcaattggttacaggaggcttta

SEQ ID NO: 7743 - DNA, 23 bp, Artificial Sequence
  human ApoB siRNA sequence
caattggttacaggaggctttaa

SEQ ID NO: 7744 - DNA, 23 bp, Artificial Sequence
  human ApoB siRNA sequence
aattggttacaggaggctttaag

SEQ ID NO: 7745 - DNA, 23 bp, Artificial Sequence
  human ApoB siRNA sequence
attggttacaggaggctttaagt

SEQ ID NO: 7746 - DNA, 23 bp, Artificial Sequence
  human ApoB siRNA sequence
ttggttacaggaggctttaagtt

SEQ ID NO: 7747 - DNA, 23 bp, Artificial Sequence
  human ApoB siRNA sequence
tggttacaggaggctttaagttc

SEQ ID NO: 7748 - DNA, 23 bp, Artificial Sequence
  human ApoB siRNA sequence
ggttacaggaggctttaagttca

SEQ ID NO: 7749 - DNA, 23 bp, Artificial Sequence
  human ApoB siRNA sequence
gttacaggaggctttaagttcag

SEQ ID NO: 7750 - DNA, 23 bp, Artificial Sequence
  human ApoB siRNA sequence
ttacaggaggctttaagttcagc

SEQ ID NO: 7751 - DNA, 23 bp, Artificial Sequence
  human ApoB siRNA sequence
tacaggaggctttaagttcagca

SEQ ID NO: 7752 - DNA, 23 bp, Artificial Sequence
  human ApoB siRNA sequence
acaggaggctttaagttcagcat

SEQ ID NO: 7753 - DNA, 23 bp, Artificial Sequence
  human ApoB siRNA sequence
caggaggctttaagttcagcatc

SEQ ID NO: 7754 - DNA, 23 bp, Artificial Sequence
  human ApoB siRNA sequence
aggaggctttaagttcagcatct

SEQ ID NO: 7755 - DNA, 23 bp, Artificial Sequence
  human ApoB siRNA sequence
ggaggctttaagttcagcatctt

SEQ ID NO: 7756 - DNA, 23 bp, Artificial Sequence
  human ApoB siRNA sequence
gaggctttaagttcagcatcttt

SEQ ID NO: 7757 - DNA, 23 bp, Artificial Sequence
  human ApoB siRNA sequence
aggctttaagttcagcatctttg

SEQ ID NO: 7758 - DNA, 23 bp, Artificial Sequence
  human ApoB siRNA sequence
ggctttaagttcagcatctttgg

SEQ ID NO: 7759 - DNA, 23 bp, Artificial Sequence
  human ApoB siRNA sequence
gctttaagttcagcatctttggc

SEQ ID NO: 7760 - DNA, 23 bp, Artificial Sequence
  human ApoB siRNA sequence
ctttaagttcagcatctttggct

SEQ ID NO: 7761 - DNA, 23 bp, Artificial Sequence
  human ApoB siRNA sequence
tttaagttcagcatctttggctc

SEQ ID NO: 7762 - DNA, 23 bp, Artificial Sequence
  human ApoB siRNA sequence
ttaagttcagcatctttggctca

SEQ ID NO: 7763 - DNA, 23 bp, Artificial Sequence
  human ApoB siRNA sequence
taagttcagcatctttggctcac

SEQ ID NO: 7764 - DNA, 23 bp, Artificial Sequence
  human ApoB siRNA sequence
aagttcagcatctttggctcaca

SEQ ID NO: 7765 - DNA, 23 bp, Artificial Sequence
  human ApoB siRNA sequence
agttcagcatctttggctcacat

SEQ ID NO: 7766 - DNA, 23 bp, Artificial Sequence
  human ApoB siRNA sequence
gttcagcatctttggctcacatg

SEQ ID NO: 7767 - DNA, 23 bp, Artificial Sequence
  human ApoB siRNA sequence
ttcagcatctttggctcacatga

SEQ ID NO: 7768 - DNA, 23 bp, Artificial Sequence
  human ApoB siRNA sequence
tcagcatctttggctcacatgaa

SEQ ID NO: 7769 - DNA, 23 bp, Artificial Sequence
  human ApoB siRNA sequence
cagcatctttggctcacatgaag

SEQ ID NO: 7770 - DNA, 23 bp, Artificial Sequence
  human ApoB siRNA sequence
agcatctttggctcacatgaagg

SEQ ID NO: 7771 - DNA, 23 bp, Artificial Sequence
  human ApoB siRNA sequence
gcatctttggctcacatgaaggc

SEQ ID NO: 7772 - DNA, 23 bp, Artificial Sequence
  human ApoB siRNA sequence
catctttggctcacatgaaggcc

SEQ ID NO: 7773 - DNA, 23 bp, Artificial Sequence
  human ApoB siRNA sequence
atctttggctcacatgaaggcca

SEQ ID NO: 7774 - DNA, 23 bp, Artificial Sequence
  human ApoB siRNA sequence
tctttggctcacatgaaggccaa

SEQ ID NO: 7775 - DNA, 23 bp, Artificial Sequence
  human ApoB siRNA sequence
ctttggctcacatgaaggccaaa

SEQ ID NO: 7776 - DNA, 23 bp, Artificial Sequence
  human ApoB siRNA sequence
tttggctcacatgaaggccaaat

SEQ ID NO: 7777 - DNA, 23 bp, Artificial Sequence
  human ApoB siRNA sequence
ttggctcacatgaaggccaaatt

SEQ ID NO: 7778 - DNA, 23 bp, Artificial Sequence
  human ApoB siRNA sequence
tggctcacatgaaggccaaattc

SEQ ID NO: 7779 - DNA, 23 bp, Artificial Sequence
  human ApoB siRNA sequence
ggctcacatgaaggccaaattcc

SEQ ID NO: 7780 - DNA, 23 bp, Artificial Sequence
  human ApoB siRNA sequence
gctcacatgaaggccaaattccg

SEQ ID NO: 7781 - DNA, 23 bp, Artificial Sequence
  human ApoB siRNA sequence
ctcacatgaaggccaaattccga

SEQ ID NO: 7782 - DNA, 23 bp, Artificial Sequence
  human ApoB siRNA sequence
tcacatgaaggccaaattccgag

SEQ ID NO: 7783 - DNA, 23 bp, Artificial Sequence
  human ApoB siRNA sequence
cacatgaaggccaaattccgaga

SEQ ID NO: 7784 - DNA, 23 bp, Artificial Sequence
  human ApoB siRNA sequence
acatgaaggccaaattccgagag

SEQ ID NO: 7785 - DNA, 23 bp, Artificial Sequence
  human ApoB siRNA sequence
catgaaggccaaattccgagaga

SEQ ID NO: 7786 - DNA, 23 bp, Artificial Sequence
  human ApoB siRNA sequence
atgaaggccaaattccgagagac

SEQ ID NO: 7787 - DNA, 23 bp, Artificial Sequence
  human ApoB siRNA sequence
tgaaggccaaattccgagagact

SEQ ID NO: 7788 - DNA, 23 bp, Artificial Sequence
  human ApoB siRNA sequence
gaaggccaaattccgagagactc

SEQ ID NO: 7789 - DNA, 23 bp, Artificial Sequence
  human ApoB siRNA sequence
aaggccaaattccgagagactct

SEQ ID NO: 7790 - DNA, 23 bp, Artificial Sequence
  human ApoB siRNA sequence
aggccaaattccgagagactcta

SEQ ID NO: 7791 - DNA, 23 bp, Artificial Sequence
  human ApoB siRNA sequence
ggccaaattccgagagactctag

SEQ ID NO: 7792 - DNA, 23 bp, Artificial Sequence
  human ApoB siRNA sequence
gccaaattccgagagactctaga

SEQ ID NO: 7793 - DNA, 23 bp, Artificial Sequence
  human ApoB siRNA sequence
ccaaattccgagagactctagaa

SEQ ID NO: 7794 - DNA, 23 bp, Artificial Sequence
  human ApoB siRNA sequence
caaattccgagagactctagaag

SEQ ID NO: 7795 - DNA, 23 bp, Artificial Sequence
  human ApoB siRNA sequence
aaattccgagagactctagaaga

SEQ ID NO: 7796 - DNA, 23 bp, Artificial Sequence
  human ApoB siRNA sequence
aattccgagagactctagaagat

SEQ ID NO: 7797 - DNA, 23 bp, Artificial Sequence
  human ApoB siRNA sequence
attccgagagactctagaagata

SEQ ID NO: 7798 - DNA, 23 bp, Artificial Sequence
  human ApoB siRNA sequence
ttccgagagactctagaagatac

SEQ ID NO: 7799 - DNA, 23 bp, Artificial Sequence
  human ApoB siRNA sequence
tccgagagactctagaagataca

SEQ ID NO: 7800 - DNA, 23 bp, Artificial Sequence
  human ApoB siRNA sequence
ccgagagactctagaagatacac

SEQ ID NO: 7801 - DNA, 23 bp, Artificial Sequence
  human ApoB siRNA sequence
cgagagactctagaagatacacg

SEQ ID NO: 7802 - DNA, 23 bp, Artificial Sequence
  human ApoB siRNA sequence
gagagactctagaagatacacga

SEQ ID NO: 7803 - DNA, 23 bp, Artificial Sequence
  human ApoB siRNA sequence
agagactctagaagatacacgag

SEQ ID NO: 7804 - DNA, 23 bp, Artificial Sequence
  human ApoB siRNA sequence
gagactctagaagatacacgaga

SEQ ID NO: 7805 - DNA, 23 bp, Artificial Sequence
  human ApoB siRNA sequence
agactctagaagatacacgagac

SEQ ID NO: 7806 - DNA, 23 bp, Artificial Sequence
  human ApoB siRNA sequence
gactctagaagatacacgagacc

SEQ ID NO: 7807 - DNA, 23 bp, Artificial Sequence
  human ApoB siRNA sequence
actctagaagatacacgagaccg

SEQ ID NO: 7808 - DNA, 23 bp, Artificial Sequence
  human ApoB siRNA sequence
ctctagaagatacacgagaccga

SEQ ID NO: 7809 - DNA, 23 bp, Artificial Sequence
  human ApoB siRNA sequence
tctagaagatacacgagaccgaa

SEQ ID NO: 7810 - DNA, 23 bp, Artificial Sequence
  human ApoB siRNA sequence
ctagaagatacacgagaccgaat

SEQ ID NO: 7811 - DNA, 23 bp, Artificial Sequence
  human ApoB siRNA sequence
tagaagatacacgagaccgaatg

SEQ ID NO: 7812 - DNA, 23 bp, Artificial Sequence
  human ApoB siRNA sequence
agaagatacacgagaccgaatgt

SEQ ID NO: 7813 - DNA, 23 bp, Artificial Sequence
  human ApoB siRNA sequence
gaagatacacgagaccgaatgta

SEQ ID NO: 7814 - DNA, 23 bp, Artificial Sequence
  human ApoB siRNA sequence
aagatacacgagaccgaatgtat

SEQ ID NO: 7815 - DNA, 23 bp, Artificial Sequence
  human ApoB siRNA sequence
agatacacgagaccgaatgtatc

SEQ ID NO: 7816 - DNA, 23 bp, Artificial Sequence
  human ApoB siRNA sequence
gatacacgagaccgaatgtatca

SEQ ID NO: 7817 - DNA, 23 bp, Artificial Sequence
  human ApoB siRNA sequence
atacacgagaccgaatgtatcaa

SEQ ID NO: 7818 - DNA, 23 bp, Artificial Sequence
  human ApoB siRNA sequence
tacacgagaccgaatgtatcaaa

SEQ ID NO: 7819 - DNA, 23 bp, Artificial Sequence
  human ApoB siRNA sequence
acacgagaccgaatgtatcaaat

SEQ ID NO: 7820 - DNA, 23 bp, Artificial Sequence
  human ApoB siRNA sequence
cacgagaccgaatgtatcaaatg

SEQ ID NO: 7821 - DNA, 23 bp, Artificial Sequence
  human ApoB siRNA sequence
acgagaccgaatgtatcaaatgg

SEQ ID NO: 7822 - DNA, 23 bp, Artificial Sequence
  human ApoB siRNA sequence
cgagaccgaatgtatcaaatgga

SEQ ID NO: 7823 - DNA, 23 bp, Artificial Sequence
  human ApoB siRNA sequence
gagaccgaatgtatcaaatggac

SEQ ID NO: 7824 - DNA, 23 bp, Artificial Sequence
  human ApoB siRNA sequence
agaccgaatgtatcaaatggaca

SEQ ID NO: 7825 - DNA, 23 bp, Artificial Sequence
  human ApoB siRNA sequence
gaccgaatgtatcaaatggacat

SEQ ID NO: 7826 - DNA, 23 bp, Artificial Sequence
  human ApoB siRNA sequence
accgaatgtatcaaatggacatt

SEQ ID NO: 7827 - DNA, 23 bp, Artificial Sequence
  human ApoB siRNA sequence
ccgaatgtatcaaatggacattc

SEQ ID NO: 7828 - DNA, 23 bp, Artificial Sequence
  human ApoB siRNA sequence
cgaatgtatcaaatggacattca

SEQ ID NO: 7829 - DNA, 23 bp, Artificial Sequence
  human ApoB siRNA sequence
gaatgtatcaaatggacattcag

SEQ ID NO: 7830 - DNA, 23 bp, Artificial Sequence
  human ApoB siRNA sequence
aatgtatcaaatggacattcagc

SEQ ID NO: 7831 - DNA, 23 bp, Artificial Sequence
  human ApoB siRNA sequence
atgtatcaaatggacattcagca

SEQ ID NO: 7832 - DNA, 23 bp, Artificial Sequence
  human ApoB siRNA sequence
tgtatcaaatggacattcagcag

SEQ ID NO: 7833 - DNA, 23 bp, Artificial Sequence
  human ApoB siRNA sequence
gtatcaaatggacattcagcagg

SEQ ID NO: 7834 - DNA, 23 bp, Artificial Sequence
  human ApoB siRNA sequence
tatcaaatggacattcagcagga

SEQ ID NO: 7835 - DNA, 23 bp, Artificial Sequence
  human ApoB siRNA sequence
atcaaatggacattcagcaggaa

SEQ ID NO: 7836 - DNA, 23 bp, Artificial Sequence
  human ApoB siRNA sequence
tcaaatggacattcagcaggaac

SEQ ID NO: 7837 - DNA, 23 bp, Artificial Sequence
  human ApoB siRNA sequence
caaatggacattcagcaggaact

SEQ ID NO: 7838 - DNA, 23 bp, Artificial Sequence
  human ApoB siRNA sequence
aaatggacattcagcaggaactt

SEQ ID NO: 7839 - DNA, 23 bp, Artificial Sequence
  human ApoB siRNA sequence
aatggacattcagcaggaacttc

SEQ ID NO: 7840 - DNA, 23 bp, Artificial Sequence
  human ApoB siRNA sequence
atggacattcagcaggaacttca

SEQ ID NO: 7841 - DNA, 23 bp, Artificial Sequence
  human ApoB siRNA sequence
tggacattcagcaggaacttcaa

SEQ ID NO: 7842 - DNA, 23 bp, Artificial Sequence
  human ApoB siRNA sequence
ggacattcagcaggaacttcaac

SEQ ID NO: 7843 - DNA, 23 bp, Artificial Sequence
  human ApoB siRNA sequence
gacattcagcaggaacttcaacg

SEQ ID NO: 7844 - DNA, 23 bp, Artificial Sequence
  human ApoB siRNA sequence
acattcagcaggaacttcaacga

SEQ ID NO: 7845 - DNA, 23 bp, Artificial Sequence
  human ApoB siRNA sequence
cattcagcaggaacttcaacgat

SEQ ID NO: 7846 - DNA, 23 bp, Artificial Sequence
  human ApoB siRNA sequence
attcagcaggaacttcaacgata

SEQ ID NO: 7847 - DNA, 23 bp, Artificial Sequence
  human ApoB siRNA sequence
ttcagcaggaacttcaacgatac

SEQ ID NO: 7848 - DNA, 23 bp, Artificial Sequence
  human ApoB siRNA sequence
tcagcaggaacttcaacgatacc

SEQ ID NO: 7849 - DNA, 23 bp, Artificial Sequence
  human ApoB siRNA sequence
cagcaggaacttcaacgatacct

SEQ ID NO: 7850 - DNA, 23 bp, Artificial Sequence
  human ApoB siRNA sequence
agcaggaacttcaacgatacctg

SEQ ID NO: 7851 - DNA, 23 bp, Artificial Sequence
  human ApoB siRNA sequence
gcaggaacttcaacgatacctgt

SEQ ID NO: 7852 - DNA, 23 bp, Artificial Sequence
  human ApoB siRNA sequence
caggaacttcaacgatacctgtc

SEQ ID NO: 7853 - DNA, 23 bp, Artificial Sequence
  human ApoB siRNA sequence
aggaacttcaacgatacctgtct

SEQ ID NO: 7854 - DNA, 23 bp, Artificial Sequence
  human ApoB siRNA sequence
ggaacttcaacgatacctgtctc

SEQ ID NO: 7855 - DNA, 23 bp, Artificial Sequence
  human ApoB siRNA sequence
gaacttcaacgatacctgtctct

SEQ ID NO: 7856 - DNA, 23 bp, Artificial Sequence
  human ApoB siRNA sequence
aacttcaacgatacctgtctctg

SEQ ID NO: 7857 - DNA, 23 bp, Artificial Sequence
  human ApoB siRNA sequence
acttcaacgatacctgtctctgg

SEQ ID NO: 7858 - DNA, 23 bp, Artificial Sequence
  human ApoB siRNA sequence
cttcaacgatacctgtctctggt

SEQ ID NO: 7859 - DNA, 23 bp, Artificial Sequence
  human ApoB siRNA sequence
ttcaacgatacctgtctctggta

SEQ ID NO: 7860 - DNA, 23 bp, Artificial Sequence
  human ApoB siRNA sequence
tcaacgatacctgtctctggtag

SEQ ID NO: 7861 - DNA, 23 bp, Artificial Sequence
  human ApoB siRNA sequence
caacgatacctgtctctggtagg

SEQ ID NO: 7862 - DNA, 23 bp, Artificial Sequence
  human ApoB siRNA sequence
aacgatacctgtctctggtaggc

SEQ ID NO: 7863 - DNA, 23 bp, Artificial Sequence
  human ApoB siRNA sequence
acgatacctgtctctggtaggcc

SEQ ID NO: 7864 - DNA, 23 bp, Artificial Sequence
  human ApoB siRNA sequence
cgatacctgtctctggtaggcca

SEQ ID NO: 7865 - DNA, 23 bp, Artificial Sequence
  human ApoB siRNA sequence
gatacctgtctctggtaggccag

SEQ ID NO: 7866 - DNA, 23 bp, Artificial Sequence
  human ApoB siRNA sequence
atacctgtctctggtaggccagg

SEQ ID NO: 7867 - DNA, 23 bp, Artificial Sequence
  human ApoB siRNA sequence
tacctgtctctggtaggccaggt

SEQ ID NO: 7868 - DNA, 23 bp, Artificial Sequence
  human ApoB siRNA sequence
acctgtctctggtaggccaggtt

SEQ ID NO: 7869 - DNA, 23 bp, Artificial Sequence
  human ApoB siRNA sequence
cctgtctctggtaggccaggttt

SEQ ID NO: 7870 - DNA, 23 bp, Artificial Sequence
  human ApoB siRNA sequence
ctgtctctggtaggccaggttta

SEQ ID NO: 7871 - DNA, 23 bp, Artificial Sequence
  human ApoB siRNA sequence
tgtctctggtaggccaggtttat

SEQ ID NO: 7872 - DNA, 23 bp, Artificial Sequence
  human ApoB siRNA sequence
gtctctggtaggccaggtttata

SEQ ID NO: 7873 - DNA, 23 bp, Artificial Sequence
  human ApoB siRNA sequence
tctctggtaggccaggtttatag

SEQ ID NO: 7874 - DNA, 23 bp, Artificial Sequence
  human ApoB siRNA sequence
ctctggtaggccaggtttatagc

SEQ ID NO: 7875 - DNA, 23 bp, Artificial Sequence
  human ApoB siRNA sequence
tctggtaggccaggtttatagca

SEQ ID NO: 7876 - DNA, 23 bp, Artificial Sequence
  human ApoB siRNA sequence
ctggtaggccaggtttatagcac

SEQ ID NO: 7877 - DNA, 23 bp, Artificial Sequence
  human ApoB siRNA sequence
tggtaggccaggtttatagcaca

SEQ ID NO: 7878 - DNA, 23 bp, Artificial Sequence
  human ApoB siRNA sequence
ggtaggccaggtttatagcacac

SEQ ID NO: 7879 - DNA, 23 bp, Artificial Sequence
  human ApoB siRNA sequence
gtaggccaggtttatagcacact

SEQ ID NO: 7880 - DNA, 23 bp, Artificial Sequence
  human ApoB siRNA sequence
taggccaggtttatagcacactt

SEQ ID NO: 7881 - DNA, 23 bp, Artificial Sequence
  human ApoB siRNA sequence
aggccaggtttatagcacacttg

SEQ ID NO: 7882 - DNA, 23 bp, Artificial Sequence
  human ApoB siRNA sequence
ggccaggtttatagcacacttgt

SEQ ID NO: 7883 - DNA, 23 bp, Artificial Sequence
  human ApoB siRNA sequence
gccaggtttatagcacacttgtc

SEQ ID NO: 7884 - DNA, 23 bp, Artificial Sequence
  human ApoB siRNA sequence
ccaggtttatagcacacttgtca

SEQ ID NO: 7885 - DNA, 23 bp, Artificial Sequence
  human ApoB siRNA sequence
caggtttatagcacacttgtcac

SEQ ID NO: 7886 - DNA, 23 bp, Artificial Sequence
  human ApoB siRNA sequence
aggtttatagcacacttgtcacc

SEQ ID NO: 7887 - DNA, 23 bp, Artificial Sequence
  human ApoB siRNA sequence
ggtttatagcacacttgtcacct

SEQ ID NO: 7888 - DNA, 23 bp, Artificial Sequence
  human ApoB siRNA sequence
gtttatagcacacttgtcaccta

SEQ ID NO: 7889 - DNA, 23 bp, Artificial Sequence
  human ApoB siRNA sequence
tttatagcacacttgtcacctac

SEQ ID NO: 7890 - DNA, 23 bp, Artificial Sequence
  human ApoB siRNA sequence
ttatagcacacttgtcacctaca

SEQ ID NO: 7891 - DNA, 23 bp, Artificial Sequence
  human ApoB siRNA sequence
tatagcacacttgtcacctacat

SEQ ID NO: 7892 - DNA, 23 bp, Artificial Sequence
  human ApoB siRNA sequence
atagcacacttgtcacctacatt

SEQ ID NO: 7893 - DNA, 23 bp, Artificial Sequence
  human ApoB siRNA sequence
tagcacacttgtcacctacattt

SEQ ID NO: 7894 - DNA, 23 bp, Artificial Sequence
  human ApoB siRNA sequence
agcacacttgtcacctacatttc

SEQ ID NO: 7895 - DNA, 23 bp, Artificial Sequence
  human ApoB siRNA sequence
gcacacttgtcacctacatttct

SEQ ID NO: 7896 - DNA, 23 bp, Artificial Sequence
  human ApoB siRNA sequence
cacacttgtcacctacatttctg

SEQ ID NO: 7897 - DNA, 23 bp, Artificial Sequence
  human ApoB siRNA sequence
acacttgtcacctacatttctga

SEQ ID NO: 7898 - DNA, 23 bp, Artificial Sequence
  human ApoB siRNA sequence
cacttgtcacctacatttctgat

SEQ ID NO: 7899 - DNA, 23 bp, Artificial Sequence
  human ApoB siRNA sequence
acttgtcacctacatttctgatt

SEQ ID NO: 7900 - DNA, 23 bp, Artificial Sequence
  human ApoB siRNA sequence
cttgtcacctacatttctgattg

SEQ ID NO: 7901 - DNA, 23 bp, Artificial Sequence
  human ApoB siRNA sequence
ttgtcacctacatttctgattgg

SEQ ID NO: 7902 - DNA, 23 bp, Artificial Sequence
  human ApoB siRNA sequence
tgtcacctacatttctgattggt

SEQ ID NO: 7903 - DNA, 23 bp, Artificial Sequence
  human ApoB siRNA sequence
gtcacctacatttctgattggtg

SEQ ID NO: 7904 - DNA, 23 bp, Artificial Sequence
  human ApoB siRNA sequence
tcacctacatttctgattggtgg

SEQ ID NO: 7905 - DNA, 23 bp, Artificial Sequence
  human ApoB siRNA sequence
cacctacatttctgattggtgga

SEQ ID NO: 7906 - DNA, 23 bp, Artificial Sequence
  human ApoB siRNA sequence
acctacatttctgattggtggac

SEQ ID NO: 7907 - DNA, 23 bp, Artificial Sequence
  human ApoB siRNA sequence
cctacatttctgattggtggact

SEQ ID NO: 7908 - DNA, 23 bp, Artificial Sequence
  human ApoB siRNA sequence
ctacatttctgattggtggactc

SEQ ID NO: 7909 - DNA, 23 bp, Artificial Sequence
  human ApoB siRNA sequence
tacatttctgattggtggactct

SEQ ID NO: 7910 - DNA, 23 bp, Artificial Sequence
  human ApoB siRNA sequence
acatttctgattggtggactctt

SEQ ID NO: 7911 - DNA, 23 bp, Artificial Sequence
  human ApoB siRNA sequence
catttctgattggtggactcttg

SEQ ID NO: 7912 - DNA, 23 bp, Artificial Sequence
  human ApoB siRNA sequence
atttctgattggtggactcttgc

SEQ ID NO: 7913 - DNA, 23 bp, Artificial Sequence
  human ApoB siRNA sequence
tttctgattggtggactcttgct

SEQ ID NO: 7914 - DNA, 23 bp, Artificial Sequence
  human ApoB siRNA sequence
ttctgattggtggactcttgctg

SEQ ID NO: 7915 - DNA, 23 bp, Artificial Sequence
  human ApoB siRNA sequence
tctgattggtggactcttgctgc

SEQ ID NO: 7916 - DNA, 23 bp, Artificial Sequence
  human ApoB siRNA sequence
ctgattggtggactcttgctgct

SEQ ID NO: 7917 - DNA, 23 bp, Artificial Sequence
  human ApoB siRNA sequence
tgattggtggactcttgctgcta

SEQ ID NO: 7918 - DNA, 23 bp, Artificial Sequence
  human ApoB siRNA sequence
gattggtggactcttgctgctaa

SEQ ID NO: 7919 - DNA, 23 bp, Artificial Sequence
  human ApoB siRNA sequence
attggtggactcttgctgctaag

SEQ ID NO: 7920 - DNA, 23 bp, Artificial Sequence
  human ApoB siRNA sequence
ttggtggactcttgctgctaaga

SEQ ID NO: 7921 - DNA, 23 bp, Artificial Sequence
  human ApoB siRNA sequence
tggtggactcttgctgctaagaa

SEQ ID NO: 7922 - DNA, 23 bp, Artificial Sequence
  human ApoB siRNA sequence
ggtggactcttgctgctaagaac

SEQ ID NO: 7923 - DNA, 23 bp, Artificial Sequence
  human ApoB siRNA sequence
gtggactcttgctgctaagaacc

SEQ ID NO: 7924 - DNA, 23 bp, Artificial Sequence
  human ApoB siRNA sequence
tggactcttgctgctaagaacct

SEQ ID NO: 7925 - DNA, 23 bp, Artificial Sequence
  human ApoB siRNA sequence
ggactcttgctgctaagaacctt

SEQ ID NO: 7926 - DNA, 23 bp, Artificial Sequence
  human ApoB siRNA sequence
gactcttgctgctaagaacctta

SEQ ID NO: 7927 - DNA, 23 bp, Artificial Sequence
  human ApoB siRNA sequence
actcttgctgctaagaaccttac

SEQ ID NO: 7928 - DNA, 23 bp, Artificial Sequence
  human ApoB siRNA sequence
ctcttgctgctaagaaccttact

SEQ ID NO: 7929 - DNA, 23 bp, Artificial Sequence
  human ApoB siRNA sequence
tcttgctgctaagaaccttactg

SEQ ID NO: 7930 - DNA, 23 bp, Artificial Sequence
  human ApoB siRNA sequence
cttgctgctaagaaccttactga

SEQ ID NO: 7931 - DNA, 23 bp, Artificial Sequence
  human ApoB siRNA sequence
ttgctgctaagaaccttactgac

SEQ ID NO: 7932 - DNA, 23 bp, Artificial Sequence
  human ApoB siRNA sequence
tgctgctaagaaccttactgact

SEQ ID NO: 7933 - DNA, 23 bp, Artificial Sequence
  human ApoB siRNA sequence
gctgctaagaaccttactgactt

SEQ ID NO: 7934 - DNA, 23 bp, Artificial Sequence
  human ApoB siRNA sequence
ctgctaagaaccttactgacttt

SEQ ID NO: 7935 - DNA, 23 bp, Artificial Sequence
  human ApoB siRNA sequence
tgctaagaaccttactgactttg

SEQ ID NO: 7936 - DNA, 23 bp, Artificial Sequence
  human ApoB siRNA sequence
gctaagaaccttactgactttgc

SEQ ID NO: 7937 - DNA, 23 bp, Artificial Sequence
  human ApoB siRNA sequence
ctaagaaccttactgactttgca

SEQ ID NO: 7938 - DNA, 23 bp, Artificial Sequence
  human ApoB siRNA sequence
taagaaccttactgactttgcag

SEQ ID NO: 7939 - DNA, 23 bp, Artificial Sequence
  human ApoB siRNA sequence
aagaaccttactgactttgcaga

SEQ ID NO: 7940 - DNA, 23 bp, Artificial Sequence
  human ApoB siRNA sequence
agaaccttactgactttgcagag

SEQ ID NO: 7941 - DNA, 23 bp, Artificial Sequence
  human ApoB siRNA sequence
gaaccttactgactttgcagagc

SEQ ID NO: 7942 - DNA, 23 bp, Artificial Sequence
  human ApoB siRNA sequence
aaccttactgactttgcagagca

SEQ ID NO: 7943 - DNA, 23 bp, Artificial Sequence
  human ApoB siRNA sequence
accttactgactttgcagagcaa

SEQ ID NO: 7944 - DNA, 23 bp, Artificial Sequence
  human ApoB siRNA sequence
ccttactgactttgcagagcaat

SEQ ID NO: 7945 - DNA, 23 bp, Artificial Sequence
  human ApoB siRNA sequence
cttactgactttgcagagcaata

SEQ ID NO: 7946 - DNA, 23 bp, Artificial Sequence
  human ApoB siRNA sequence
ttactgactttgcagagcaatat

SEQ ID NO: 7947 - DNA, 23 bp, Artificial Sequence
  human ApoB siRNA sequence
tactgactttgcagagcaatatt

SEQ ID NO: 7948 - DNA, 23 bp, Artificial Sequence
  human ApoB siRNA sequence
actgactttgcagagcaatattc

SEQ ID NO: 7949 - DNA, 23 bp, Artificial Sequence
  human ApoB siRNA sequence
ctgactttgcagagcaatattct

SEQ ID NO: 7950 - DNA, 23 bp, Artificial Sequence
  human ApoB siRNA sequence
tgactttgcagagcaatattcta

SEQ ID NO: 7951 - DNA, 23 bp, Artificial Sequence
  human ApoB siRNA sequence
gactttgcagagcaatattctat

SEQ ID NO: 7952 - DNA, 23 bp, Artificial Sequence
  human ApoB siRNA sequence
actttgcagagcaatattctatc

SEQ ID NO: 7953 - DNA, 23 bp, Artificial Sequence
  human ApoB siRNA sequence
ctttgcagagcaatattctatcc

SEQ ID NO: 7954 - DNA, 23 bp, Artificial Sequence
  human ApoB siRNA sequence
tttgcagagcaatattctatcca

SEQ ID NO: 7955 - DNA, 23 bp, Artificial Sequence
  human ApoB siRNA sequence
ttgcagagcaatattctatccaa

SEQ ID NO: 7956 - DNA, 23 bp, Artificial Sequence
  human ApoB siRNA sequence
tgcagagcaatattctatccaag

SEQ ID NO: 7957 - DNA, 23 bp, Artificial Sequence
  human ApoB siRNA sequence
gcagagcaatattctatccaaga

SEQ ID NO: 7958 - DNA, 23 bp, Artificial Sequence
  human ApoB siRNA sequence
cagagcaatattctatccaagat

SEQ ID NO: 7959 - DNA, 23 bp, Artificial Sequence
  human ApoB siRNA sequence
agagcaatattctatccaagatt

SEQ ID NO: 7960 - DNA, 23 bp, Artificial Sequence
  human ApoB siRNA sequence
gagcaatattctatccaagattg

SEQ ID NO: 7961 - DNA, 23 bp, Artificial Sequence
  human ApoB siRNA sequence
agcaatattctatccaagattgg

SEQ ID NO: 7962 - DNA, 23 bp, Artificial Sequence
  human ApoB siRNA sequence
gcaatattctatccaagattggg

SEQ ID NO: 7963 - DNA, 23 bp, Artificial Sequence
  human ApoB siRNA sequence
caatattctatccaagattgggc

SEQ ID NO: 7964 - DNA, 23 bp, Artificial Sequence
  human ApoB siRNA sequence
aatattctatccaagattgggct

SEQ ID NO: 7965 - DNA, 23 bp, Artificial Sequence
  human ApoB siRNA sequence
atattctatccaagattgggcta

SEQ ID NO: 7966 - DNA, 23 bp, Artificial Sequence
  human ApoB siRNA sequence
tattctatccaagattgggctaa

SEQ ID NO: 7967 - DNA, 23 bp, Artificial Sequence
  human ApoB siRNA sequence
attctatccaagattgggctaaa

SEQ ID NO: 7968 - DNA, 23 bp, Artificial Sequence
  human ApoB siRNA sequence
ttctatccaagattgggctaaac

SEQ ID NO: 7969 - DNA, 23 bp, Artificial Sequence
  human ApoB siRNA sequence
tctatccaagattgggctaaacg

SEQ ID NO: 7970 - DNA, 23 bp, Artificial Sequence
  human ApoB siRNA sequence
ctatccaagattgggctaaacgt

SEQ ID NO: 7971 - DNA, 23 bp, Artificial Sequence
  human ApoB siRNA sequence
tatccaagattgggctaaacgta

SEQ ID NO: 7972 - DNA, 23 bp, Artificial Sequence
  human ApoB siRNA sequence
atccaagattgggctaaacgtat

SEQ ID NO: 7973 - DNA, 23 bp, Artificial Sequence
  human ApoB siRNA sequence
tccaagattgggctaaacgtatg

SEQ ID NO: 7974 - DNA, 23 bp, Artificial Sequence
  human ApoB siRNA sequence
ccaagattgggctaaacgtatga

SEQ ID NO: 7975 - DNA, 23 bp, Artificial Sequence
  human ApoB siRNA sequence
caagattgggctaaacgtatgaa

SEQ ID NO: 7976 - DNA, 23 bp, Artificial Sequence
  human ApoB siRNA sequence
aagattgggctaaacgtatgaaa

SEQ ID NO: 7977 - DNA, 23 bp, Artificial Sequence
  human ApoB siRNA sequence
agattgggctaaacgtatgaaag

SEQ ID NO: 7978 - DNA, 23 bp, Artificial Sequence
  human ApoB siRNA sequence
gattgggctaaacgtatgaaagc

SEQ ID NO: 7979 - DNA, 23 bp, Artificial Sequence
  human ApoB siRNA sequence
attgggctaaacgtatgaaagca

SEQ ID NO: 7980 - DNA, 23 bp, Artificial Sequence
  human ApoB siRNA sequence
ttgggctaaacgtatgaaagcat

SEQ ID NO: 7981 - DNA, 23 bp, Artificial Sequence
  human ApoB siRNA sequence
tgggctaaacgtatgaaagcatt

SEQ ID NO: 7982 - DNA, 23 bp, Artificial Sequence
  human ApoB siRNA sequence
gggctaaacgtatgaaagcattg

SEQ ID NO: 7983 - DNA, 23 bp, Artificial Sequence
  human ApoB siRNA sequence
ggctaaacgtatgaaagcattgg

SEQ ID NO: 7984 - DNA, 23 bp, Artificial Sequence
  human ApoB siRNA sequence
gctaaacgtatgaaagcattggt

SEQ ID NO: 7985 - DNA, 23 bp, Artificial Sequence
  human ApoB siRNA sequence
ctaaacgtatgaaagcattggta

SEQ ID NO: 7986 - DNA, 23 bp, Artificial Sequence
  human ApoB siRNA sequence
taaacgtatgaaagcattggtag

SEQ ID NO: 7987 - DNA, 23 bp, Artificial Sequence
  human ApoB siRNA sequence
aaacgtatgaaagcattggtaga

SEQ ID NO: 7988 - DNA, 23 bp, Artificial Sequence
  human ApoB siRNA sequence
aacgtatgaaagcattggtagag

SEQ ID NO: 7989 - DNA, 23 bp, Artificial Sequence
  human ApoB siRNA sequence
acgtatgaaagcattggtagagc

SEQ ID NO: 7990 - DNA, 23 bp, Artificial Sequence
  human ApoB siRNA sequence
cgtatgaaagcattggtagagca

SEQ ID NO: 7991 - DNA, 23 bp, Artificial Sequence
  human ApoB siRNA sequence
gtatgaaagcattggtagagcaa

SEQ ID NO: 7992 - DNA, 23 bp, Artificial Sequence
  human ApoB siRNA sequence
tatgaaagcattggtagagcaag

SEQ ID NO: 7993 - DNA, 23 bp, Artificial Sequence
  human ApoB siRNA sequence
atgaaagcattggtagagcaagg

SEQ ID NO: 7994 - DNA, 23 bp, Artificial Sequence
  human ApoB siRNA sequence
tgaaagcattggtagagcaaggg

SEQ ID NO: 7995 - DNA, 23 bp, Artificial Sequence
  human ApoB siRNA sequence
gaaagcattggtagagcaagggt

SEQ ID NO: 7996 - DNA, 23 bp, Artificial Sequence
  human ApoB siRNA sequence
aaagcattggtagagcaagggtt

SEQ ID NO: 7997 - DNA, 23 bp, Artificial Sequence
  human ApoB siRNA sequence
aagcattggtagagcaagggttc

SEQ ID NO: 7998 - DNA, 23 bp, Artificial Sequence
  human ApoB siRNA sequence
agcattggtagagcaagggttca

SEQ ID NO: 7999 - DNA, 23 bp, Artificial Sequence
  human ApoB siRNA sequence
gcattggtagagcaagggttcac

SEQ ID NO: 8000 - DNA, 23 bp, Artificial Sequence
  human ApoB siRNA sequence
cattggtagagcaagggttcact

SEQ ID NO: 8001 - DNA, 23 bp, Artificial Sequence
  human ApoB siRNA sequence
attggtagagcaagggttcactg

SEQ ID NO: 8002 - DNA, 23 bp, Artificial Sequence
  human ApoB siRNA sequence
ttggtagagcaagggttcactgt

SEQ ID NO: 8003 - DNA, 23 bp, Artificial Sequence
  human ApoB siRNA sequence
tggtagagcaagggttcactgtt

SEQ ID NO: 8004 - DNA, 23 bp, Artificial Sequence
  human ApoB siRNA sequence
ggtagagcaagggttcactgttc

SEQ ID NO: 8005 - DNA, 23 bp, Artificial Sequence
  human ApoB siRNA sequence
gtagagcaagggttcactgttcc

SEQ ID NO: 8006 - DNA, 23 bp, Artificial Sequence
  human ApoB siRNA sequence
tagagcaagggttcactgttcct

SEQ ID NO: 8007 - DNA, 23 bp, Artificial Sequence
  human ApoB siRNA sequence
agagcaagggttcactgttcctg

SEQ ID NO: 8008 - DNA, 23 bp, Artificial Sequence
  human ApoB siRNA sequence
gagcaagggttcactgttcctga

SEQ ID NO: 8009 - DNA, 23 bp, Artificial Sequence
  human ApoB siRNA sequence
agcaagggttcactgttcctgaa

SEQ ID NO: 8010 - DNA, 23 bp, Artificial Sequence
  human ApoB siRNA sequence
gcaagggttcactgttcctgaaa

SEQ ID NO: 8011 - DNA, 23 bp, Artificial Sequence
  human ApoB siRNA sequence
caagggttcactgttcctgaaat

SEQ ID NO: 8012 - DNA, 23 bp, Artificial Sequence
  human ApoB siRNA sequence
aagggttcactgttcctgaaatc

SEQ ID NO: 8013 - DNA, 23 bp, Artificial Sequence
  human ApoB siRNA sequence
agggttcactgttcctgaaatca

SEQ ID NO: 8014 - DNA, 23 bp, Artificial Sequence
  human ApoB siRNA sequence
gggttcactgttcctgaaatcaa

SEQ ID NO: 8015 - DNA, 23 bp, Artificial Sequence
  human ApoB siRNA sequence
ggttcactgttcctgaaatcaag

SEQ ID NO: 8016 - DNA, 23 bp, Artificial Sequence
  human ApoB siRNA sequence
gttcactgttcctgaaatcaaga

SEQ ID NO: 8017 - DNA, 23 bp, Artificial Sequence
  human ApoB siRNA sequence
ttcactgttcctgaaatcaagac

SEQ ID NO: 8018 - DNA, 23 bp, Artificial Sequence
  human ApoB siRNA sequence
tcactgttcctgaaatcaagacc

SEQ ID NO: 8019 - DNA, 23 bp, Artificial Sequence
  human ApoB siRNA sequence
cactgttcctgaaatcaagacca

SEQ ID NO: 8020 - DNA, 23 bp, Artificial Sequence
  human ApoB siRNA sequence
actgttcctgaaatcaagaccat

SEQ ID NO: 8021 - DNA, 23 bp, Artificial Sequence
  human ApoB siRNA sequence
ctgttcctgaaatcaagaccatc

SEQ ID NO: 8022 - DNA, 23 bp, Artificial Sequence
  human ApoB siRNA sequence
tgttcctgaaatcaagaccatcc

SEQ ID NO: 8023 - DNA, 23 bp, Artificial Sequence
  human ApoB siRNA sequence
gttcctgaaatcaagaccatcct

SEQ ID NO: 8024 - DNA, 23 bp, Artificial Sequence
  human ApoB siRNA sequence
ttcctgaaatcaagaccatcctt

SEQ ID NO: 8025 - DNA, 23 bp, Artificial Sequence
  human ApoB siRNA sequence
tcctgaaatcaagaccatccttg

SEQ ID NO: 8026 - DNA, 23 bp, Artificial Sequence
  human ApoB siRNA sequence
cctgaaatcaagaccatccttgg

SEQ ID NO: 8027 - DNA, 23 bp, Artificial Sequence
  human ApoB siRNA sequence
ctgaaatcaagaccatccttggg

SEQ ID NO: 8028 - DNA, 23 bp, Artificial Sequence
  human ApoB siRNA sequence
tgaaatcaagaccatccttggga

SEQ ID NO: 8029 - DNA, 23 bp, Artificial Sequence
  human ApoB siRNA sequence
gaaatcaagaccatccttgggac

SEQ ID NO: 8030 - DNA, 23 bp, Artificial Sequence
  human ApoB siRNA sequence
aaatcaagaccatccttgggacc

SEQ ID NO: 8031 - DNA, 23 bp, Artificial Sequence
  human ApoB siRNA sequence
aatcaagaccatccttgggacca

SEQ ID NO: 8032 - DNA, 23 bp, Artificial Sequence
  human ApoB siRNA sequence
atcaagaccatccttgggaccat

SEQ ID NO: 8033 - DNA, 23 bp, Artificial Sequence
  human ApoB siRNA sequence
tcaagaccatccttgggaccatg

SEQ ID NO: 8034 - DNA, 23 bp, Artificial Sequence
  human ApoB siRNA sequence
caagaccatccttgggaccatgc

SEQ ID NO: 8035 - DNA, 23 bp, Artificial Sequence
  human ApoB siRNA sequence
aagaccatccttgggaccatgcc

SEQ ID NO: 8036 - DNA, 23 bp, Artificial Sequence
  human ApoB siRNA sequence
agaccatccttgggaccatgcct

SEQ ID NO: 8037 - DNA, 23 bp, Artificial Sequence
  human ApoB siRNA sequence
gaccatccttgggaccatgcctg

SEQ ID NO: 8038 - DNA, 23 bp, Artificial Sequence
  human ApoB siRNA sequence
accatccttgggaccatgcctgc

SEQ ID NO: 8039 - DNA, 23 bp, Artificial Sequence
  human ApoB siRNA sequence
ccatccttgggaccatgcctgcc

SEQ ID NO: 8040 - DNA, 23 bp, Artificial Sequence
  human ApoB siRNA sequence
catccttgggaccatgcctgcct

SEQ ID NO: 8041 - DNA, 23 bp, Artificial Sequence
  human ApoB siRNA sequence
atccttgggaccatgcctgcctt

SEQ ID NO: 8042 - DNA, 23 bp, Artificial Sequence
  human ApoB siRNA sequence
tccttgggaccatgcctgccttt

SEQ ID NO: 8043 - DNA, 23 bp, Artificial Sequence
  human ApoB siRNA sequence
ccttgggaccatgcctgcctttg

SEQ ID NO: 8044 - DNA, 23 bp, Artificial Sequence
  human ApoB siRNA sequence
cttgggaccatgcctgcctttga

SEQ ID NO: 8045 - DNA, 23 bp, Artificial Sequence
  human ApoB siRNA sequence
ttgggaccatgcctgcctttgaa

SEQ ID NO: 8046 - DNA, 23 bp, Artificial Sequence
  human ApoB siRNA sequence
tgggaccatgcctgcctttgaag

SEQ ID NO: 8047 - DNA, 23 bp, Artificial Sequence
  human ApoB siRNA sequence
gggaccatgcctgcctttgaagt

SEQ ID NO: 8048 - DNA, 23 bp, Artificial Sequence
  human ApoB siRNA sequence
ggaccatgcctgcctttgaagtc

SEQ ID NO: 8049 - DNA, 23 bp, Artificial Sequence
  human ApoB siRNA sequence
gaccatgcctgcctttgaagtca

SEQ ID NO: 8050 - DNA, 23 bp, Artificial Sequence
  human ApoB siRNA sequence
accatgcctgcctttgaagtcag

SEQ ID NO: 8051 - DNA, 23 bp, Artificial Sequence
  human ApoB siRNA sequence
ccatgcctgcctttgaagtcagt

SEQ ID NO: 8052 - DNA, 23 bp, Artificial Sequence
  human ApoB siRNA sequence
catgcctgcctttgaagtcagtc

SEQ ID NO: 8053 - DNA, 23 bp, Artificial Sequence
  human ApoB siRNA sequence
atgcctgcctttgaagtcagtct

SEQ ID NO: 8054 - DNA, 23 bp, Artificial Sequence
  human ApoB siRNA sequence
tgcctgcctttgaagtcagtctt

SEQ ID NO: 8055 - DNA, 23 bp, Artificial Sequence
  human ApoB siRNA sequence
gcctgcctttgaagtcagtcttc

SEQ ID NO: 8056 - DNA, 23 bp, Artificial Sequence
  human ApoB siRNA sequence
cctgcctttgaagtcagtcttca

SEQ ID NO: 8057 - DNA, 23 bp, Artificial Sequence
  human ApoB siRNA sequence
ctgcctttgaagtcagtcttcag

SEQ ID NO: 8058 - DNA, 23 bp, Artificial Sequence
  human ApoB siRNA sequence
tgcctttgaagtcagtcttcagg

SEQ ID NO: 8059 - DNA, 23 bp, Artificial Sequence
  human ApoB siRNA sequence
gcctttgaagtcagtcttcaggc

SEQ ID NO: 8060 - DNA, 23 bp, Artificial Sequence
  human ApoB siRNA sequence
cctttgaagtcagtcttcaggct

SEQ ID NO: 8061 - DNA, 23 bp, Artificial Sequence
  human ApoB siRNA sequence
ctttgaagtcagtcttcaggctc

SEQ ID NO: 8062 - DNA, 23 bp, Artificial Sequence
  human ApoB siRNA sequence
tttgaagtcagtcttcaggctct

SEQ ID NO: 8063 - DNA, 23 bp, Artificial Sequence
  human ApoB siRNA sequence
ttgaagtcagtcttcaggctctt

SEQ ID NO: 8064 - DNA, 23 bp, Artificial Sequence
  human ApoB siRNA sequence
tgaagtcagtcttcaggctcttc

SEQ ID NO: 8065 - DNA, 23 bp, Artificial Sequence
  human ApoB siRNA sequence
gaagtcagtcttcaggctcttca

SEQ ID NO: 8066 - DNA, 23 bp, Artificial Sequence
  human ApoB siRNA sequence
aagtcagtcttcaggctcttcag

SEQ ID NO: 8067 - DNA, 23 bp, Artificial Sequence
  human ApoB siRNA sequence
agtcagtcttcaggctcttcaga

SEQ ID NO: 8068 - DNA, 23 bp, Artificial Sequence
  human ApoB siRNA sequence
gtcagtcttcaggctcttcagaa

SEQ ID NO: 8069 - DNA, 23 bp, Artificial Sequence
  human ApoB siRNA sequence
tcagtcttcaggctcttcagaaa

SEQ ID NO: 8070 - DNA, 23 bp, Artificial Sequence
  human ApoB siRNA sequence
cagtcttcaggctcttcagaaag

SEQ ID NO: 8071 - DNA, 23 bp, Artificial Sequence
  human ApoB siRNA sequence
agtcttcaggctcttcagaaagc

SEQ ID NO: 8072 - DNA, 23 bp, Artificial Sequence
  human ApoB siRNA sequence
gtcttcaggctcttcagaaagct

SEQ ID NO: 8073 - DNA, 23 bp, Artificial Sequence
  human ApoB siRNA sequence
tcttcaggctcttcagaaagcta

SEQ ID NO: 8074 - DNA, 23 bp, Artificial Sequence
  human ApoB siRNA sequence
cttcaggctcttcagaaagctac

SEQ ID NO: 8075 - DNA, 23 bp, Artificial Sequence
  human ApoB siRNA sequence
ttcaggctcttcagaaagctacc

SEQ ID NO: 8076 - DNA, 23 bp, Artificial Sequence
  human ApoB siRNA sequence
tcaggctcttcagaaagctacct

SEQ ID NO: 8077 - DNA, 23 bp, Artificial Sequence
  human ApoB siRNA sequence
caggctcttcagaaagctacctt

SEQ ID NO: 8078 - DNA, 23 bp, Artificial Sequence
  human ApoB siRNA sequence
aggctcttcagaaagctaccttc

SEQ ID NO: 8079 - DNA, 23 bp, Artificial Sequence
  human ApoB siRNA sequence
ggctcttcagaaagctaccttcc

SEQ ID NO: 8080 - DNA, 23 bp, Artificial Sequence
  human ApoB siRNA sequence
gctcttcagaaagctaccttcca

SEQ ID NO: 8081 - DNA, 23 bp, Artificial Sequence
  human ApoB siRNA sequence
ctcttcagaaagctaccttccag

SEQ ID NO: 8082 - DNA, 23 bp, Artificial Sequence
  human ApoB siRNA sequence
tcttcagaaagctaccttccaga

SEQ ID NO: 8083 - DNA, 23 bp, Artificial Sequence
  human ApoB siRNA sequence
cttcagaaagctaccttccagac

SEQ ID NO: 8084 - DNA, 23 bp, Artificial Sequence
  human ApoB siRNA sequence
ttcagaaagctaccttccagaca

SEQ ID NO: 8085 - DNA, 23 bp, Artificial Sequence
  human ApoB siRNA sequence
tcagaaagctaccttccagacac

SEQ ID NO: 8086 - DNA, 23 bp, Artificial Sequence
  human ApoB siRNA sequence
cagaaagctaccttccagacacc

SEQ ID NO: 8087 - DNA, 23 bp, Artificial Sequence
  human ApoB siRNA sequence
agaaagctaccttccagacacct

SEQ ID NO: 8088 - DNA, 23 bp, Artificial Sequence
  human ApoB siRNA sequence
gaaagctaccttccagacacctg

SEQ ID NO: 8089 - DNA, 23 bp, Artificial Sequence
  human ApoB siRNA sequence
aaagctaccttccagacacctga

SEQ ID NO: 8090 - DNA, 23 bp, Artificial Sequence
  human ApoB siRNA sequence
aagctaccttccagacacctgat

SEQ ID NO: 8091 - DNA, 23 bp, Artificial Sequence
  human ApoB siRNA sequence
agctaccttccagacacctgatt

SEQ ID NO: 8092 - DNA, 23 bp, Artificial Sequence
  human ApoB siRNA sequence
gctaccttccagacacctgattt

SEQ ID NO: 8093 - DNA, 23 bp, Artificial Sequence
  human ApoB siRNA sequence
ctaccttccagacacctgatttt

SEQ ID NO: 8094 - DNA, 23 bp, Artificial Sequence
  human ApoB siRNA sequence
taccttccagacacctgatttta

SEQ ID NO: 8095 - DNA, 23 bp, Artificial Sequence
  human ApoB siRNA sequence
accttccagacacctgattttat

SEQ ID NO: 8096 - DNA, 23 bp, Artificial Sequence
  human ApoB siRNA sequence
ccttccagacacctgattttata

SEQ ID NO: 8097 - DNA, 23 bp, Artificial Sequence
  human ApoB siRNA sequence
cttccagacacctgattttatag

SEQ ID NO: 8098 - DNA, 23 bp, Artificial Sequence
  human ApoB siRNA sequence
ttccagacacctgattttatagt

SEQ ID NO: 8099 - DNA, 23 bp, Artificial Sequence
  human ApoB siRNA sequence
tccagacacctgattttatagtc

SEQ ID NO: 8100 - DNA, 23 bp, Artificial Sequence
  human ApoB siRNA sequence
ccagacacctgattttatagtcc

SEQ ID NO: 8101 - DNA, 23 bp, Artificial Sequence
  human ApoB siRNA sequence
cagacacctgattttatagtccc

SEQ ID NO: 8102 - DNA, 23 bp, Artificial Sequence
  human ApoB siRNA sequence
agacacctgattttatagtcccc

SEQ ID NO: 8103 - DNA, 23 bp, Artificial Sequence
  human ApoB siRNA sequence
gacacctgattttatagtccccc

SEQ ID NO: 8104 - DNA, 23 bp, Artificial Sequence
  human ApoB siRNA sequence
acacctgattttatagtccccct

SEQ ID NO: 8105 - DNA, 23 bp, Artificial Sequence
  human ApoB siRNA sequence
cacctgattttatagtcccccta

SEQ ID NO: 8106 - DNA, 23 bp, Artificial Sequence
  human ApoB siRNA sequence
acctgattttatagtccccctaa

SEQ ID NO: 8107 - DNA, 23 bp, Artificial Sequence
  human ApoB siRNA sequence
cctgattttatagtccccctaac

SEQ ID NO: 8108 - DNA, 23 bp, Artificial Sequence
  human ApoB siRNA sequence
ctgattttatagtccccctaaca

SEQ ID NO: 8109 - DNA, 23 bp, Artificial Sequence
  human ApoB siRNA sequence
tgattttatagtccccctaacag

SEQ ID NO: 8110 - DNA, 23 bp, Artificial Sequence
  human ApoB siRNA sequence
gattttatagtccccctaacaga

SEQ ID NO: 8111 - DNA, 23 bp, Artificial Sequence
  human ApoB siRNA sequence
attttatagtccccctaacagat

SEQ ID NO: 8112 - DNA, 23 bp, Artificial Sequence
  human ApoB siRNA sequence
ttttatagtccccctaacagatt

SEQ ID NO: 8113 - DNA, 23 bp, Artificial Sequence
  human ApoB siRNA sequence
tttatagtccccctaacagattt

SEQ ID NO: 8114 - DNA, 23 bp, Artificial Sequence
  human ApoB siRNA sequence
ttatagtccccctaacagatttg

SEQ ID NO: 8115 - DNA, 23 bp, Artificial Sequence
  human ApoB siRNA sequence
tatagtccccctaacagatttga

SEQ ID NO: 8116 - DNA, 23 bp, Artificial Sequence
  human ApoB siRNA sequence
atagtccccctaacagatttgag

SEQ ID NO: 8117 - DNA, 23 bp, Artificial Sequence
  human ApoB siRNA sequence
tagtccccctaacagatttgagg

SEQ ID NO: 8118 - DNA, 23 bp, Artificial Sequence
  human ApoB siRNA sequence
agtccccctaacagatttgagga

SEQ ID NO: 8119 - DNA, 23 bp, Artificial Sequence
  human ApoB siRNA sequence
gtccccctaacagatttgaggat

SEQ ID NO: 8120 - DNA, 23 bp, Artificial Sequence
  human ApoB siRNA sequence
tccccctaacagatttgaggatt

SEQ ID NO: 8121 - DNA, 23 bp, Artificial Sequence
  human ApoB siRNA sequence
ccccctaacagatttgaggattc

SEQ ID NO: 8122 - DNA, 23 bp, Artificial Sequence
  human ApoB siRNA sequence
cccctaacagatttgaggattcc

SEQ ID NO: 8123 - DNA, 23 bp, Artificial Sequence
  human ApoB siRNA sequence
ccctaacagatttgaggattcca

SEQ ID NO: 8124 - DNA, 23 bp, Artificial Sequence
  human ApoB siRNA sequence
cctaacagatttgaggattccat

SEQ ID NO: 8125 - DNA, 23 bp, Artificial Sequence
  human ApoB siRNA sequence
ctaacagatttgaggattccatc

SEQ ID NO: 8126 - DNA, 23 bp, Artificial Sequence
  human ApoB siRNA sequence
taacagatttgaggattccatca

SEQ ID NO: 8127 - DNA, 23 bp, Artificial Sequence
  human ApoB siRNA sequence
aacagatttgaggattccatcag

SEQ ID NO: 8128 - DNA, 23 bp, Artificial Sequence
  human ApoB siRNA sequence
acagatttgaggattccatcagt

SEQ ID NO: 8129 - DNA, 23 bp, Artificial Sequence
  human ApoB siRNA sequence
cagatttgaggattccatcagtt

SEQ ID NO: 8130 - DNA, 23 bp, Artificial Sequence
  human ApoB siRNA sequence
agatttgaggattccatcagttc

SEQ ID NO: 8131 - DNA, 23 bp, Artificial Sequence
  human ApoB siRNA sequence
gatttgaggattccatcagttca

SEQ ID NO: 8132 - DNA, 23 bp, Artificial Sequence
  human ApoB siRNA sequence
atttgaggattccatcagttcag

SEQ ID NO: 8133 - DNA, 23 bp, Artificial Sequence
  human ApoB siRNA sequence
tttgaggattccatcagttcaga

SEQ ID NO: 8134 - DNA, 23 bp, Artificial Sequence
  human ApoB siRNA sequence
ttgaggattccatcagttcagat

SEQ ID NO: 8135 - DNA, 23 bp, Artificial Sequence
  human ApoB siRNA sequence
tgaggattccatcagttcagata

SEQ ID NO: 8136 - DNA, 23 bp, Artificial Sequence
  human ApoB siRNA sequence
gaggattccatcagttcagataa

SEQ ID NO: 8137 - DNA, 23 bp, Artificial Sequence
  human ApoB siRNA sequence
aggattccatcagttcagataaa

SEQ ID NO: 8138 - DNA, 23 bp, Artificial Sequence
  human ApoB siRNA sequence
ggattccatcagttcagataaac

SEQ ID NO: 8139 - DNA, 23 bp, Artificial Sequence
  human ApoB siRNA sequence
gattccatcagttcagataaact

SEQ ID NO: 8140 - DNA, 23 bp, Artificial Sequence
  human ApoB siRNA sequence
attccatcagttcagataaactt

SEQ ID NO: 8141 - DNA, 23 bp, Artificial Sequence
  human ApoB siRNA sequence
ttccatcagttcagataaacttc

SEQ ID NO: 8142 - DNA, 23 bp, Artificial Sequence
  human ApoB siRNA sequence
tccatcagttcagataaacttca

SEQ ID NO: 8143 - DNA, 23 bp, Artificial Sequence
  human ApoB siRNA sequence
ccatcagttcagataaacttcaa

SEQ ID NO: 8144 - DNA, 23 bp, Artificial Sequence
  human ApoB siRNA sequence
catcagttcagataaacttcaaa

SEQ ID NO: 8145 - DNA, 23 bp, Artificial Sequence
  human ApoB siRNA sequence
atcagttcagataaacttcaaag

SEQ ID NO: 8146 - DNA, 23 bp, Artificial Sequence
  human ApoB siRNA sequence
tcagttcagataaacttcaaaga

SEQ ID NO: 8147 - DNA, 23 bp, Artificial Sequence
  human ApoB siRNA sequence
cagttcagataaacttcaaagac

SEQ ID NO: 8148 - DNA, 23 bp, Artificial Sequence
  human ApoB siRNA sequence
agttcagataaacttcaaagact

SEQ ID NO: 8149 - DNA, 23 bp, Artificial Sequence
  human ApoB siRNA sequence
gttcagataaacttcaaagactt

SEQ ID NO: 8150 - DNA, 23 bp, Artificial Sequence
  human ApoB siRNA sequence
ttcagataaacttcaaagactta

SEQ ID NO: 8151 - DNA, 23 bp, Artificial Sequence
  human ApoB siRNA sequence
tcagataaacttcaaagacttaa

SEQ ID NO: 8152 - DNA, 23 bp, Artificial Sequence
  human ApoB siRNA sequence
cagataaacttcaaagacttaaa

SEQ ID NO: 8153 - DNA, 23 bp, Artificial Sequence
  human ApoB siRNA sequence
agataaacttcaaagacttaaaa

SEQ ID NO: 8154 - DNA, 23 bp, Artificial Sequence
  human ApoB siRNA sequence
gataaacttcaaagacttaaaaa

SEQ ID NO: 8155 - DNA, 23 bp, Artificial Sequence
  human ApoB siRNA sequence
ataaacttcaaagacttaaaaaa

SEQ ID NO: 8156 - DNA, 23 bp, Artificial Sequence
  human ApoB siRNA sequence
taaacttcaaagacttaaaaaat

SEQ ID NO: 8157 - DNA, 23 bp, Artificial Sequence
  human ApoB siRNA sequence
aaacttcaaagacttaaaaaata

SEQ ID NO: 8158 - DNA, 23 bp, Artificial Sequence
  human ApoB siRNA sequence
aacttcaaagacttaaaaaatat

SEQ ID NO: 8159 - DNA, 23 bp, Artificial Sequence
  human ApoB siRNA sequence
acttcaaagacttaaaaaatata

SEQ ID NO: 8160 - DNA, 23 bp, Artificial Sequence
  human ApoB siRNA sequence
cttcaaagacttaaaaaatataa

SEQ ID NO: 8161 - DNA, 23 bp, Artificial Sequence
  human ApoB siRNA sequence
ttcaaagacttaaaaaatataaa

SEQ ID NO: 8162 - DNA, 23 bp, Artificial Sequence
  human ApoB siRNA sequence
tcaaagacttaaaaaatataaaa

SEQ ID NO: 8163 - DNA, 23 bp, Artificial Sequence
  human ApoB siRNA sequence
caaagacttaaaaaatataaaaa

SEQ ID NO: 8164 - DNA, 23 bp, Artificial Sequence
  human ApoB siRNA sequence
aaagacttaaaaaatataaaaat

SEQ ID NO: 8165 - DNA, 23 bp, Artificial Sequence
  human ApoB siRNA sequence
aagacttaaaaaatataaaaatc

SEQ ID NO: 8166 - DNA, 23 bp, Artificial Sequence
  human ApoB siRNA sequence
agacttaaaaaatataaaaatcc

SEQ ID NO: 8167 - DNA, 23 bp, Artificial Sequence
  human ApoB siRNA sequence
gacttaaaaaatataaaaatccc

SEQ ID NO: 8168 - DNA, 23 bp, Artificial Sequence
  human ApoB siRNA sequence
acttaaaaaatataaaaatccca

SEQ ID NO: 8169 - DNA, 23 bp, Artificial Sequence
  human ApoB siRNA sequence
cttaaaaaatataaaaatcccat

SEQ ID NO: 8170 - DNA, 23 bp, Artificial Sequence
  human ApoB siRNA sequence
ttaaaaaatataaaaatcccatc

SEQ ID NO: 8171 - DNA, 23 bp, Artificial Sequence
  human ApoB siRNA sequence
taaaaaatataaaaatcccatcc

SEQ ID NO: 8172 - DNA, 23 bp, Artificial Sequence
  human ApoB siRNA sequence
aaaaaatataaaaatcccatcca

SEQ ID NO: 8173 - DNA, 23 bp, Artificial Sequence
  human ApoB siRNA sequence
aaaaatataaaaatcccatccag

SEQ ID NO: 8174 - DNA, 23 bp, Artificial Sequence
  human ApoB siRNA sequence
aaaatataaaaatcccatccagg

SEQ ID NO: 8175 - DNA, 23 bp, Artificial Sequence
  human ApoB siRNA sequence
aaatataaaaatcccatccaggt

SEQ ID NO: 8176 - DNA, 23 bp, Artificial Sequence
  human ApoB siRNA sequence
aatataaaaatcccatccaggtt

SEQ ID NO: 8177 - DNA, 23 bp, Artificial Sequence
  human ApoB siRNA sequence
atataaaaatcccatccaggttt

SEQ ID NO: 8178 - DNA, 23 bp, Artificial Sequence
  human ApoB siRNA sequence
tataaaaatcccatccaggtttt

SEQ ID NO: 8179 - DNA, 23 bp, Artificial Sequence
  human ApoB siRNA sequence
ataaaaatcccatccaggttttc

SEQ ID NO: 8180 - DNA, 23 bp, Artificial Sequence
  human ApoB siRNA sequence
taaaaatcccatccaggttttcc

SEQ ID NO: 8181 - DNA, 23 bp, Artificial Sequence
  human ApoB siRNA sequence
aaaaatcccatccaggttttcca

SEQ ID NO: 8182 - DNA, 23 bp, Artificial Sequence
  human ApoB siRNA sequence
aaaatcccatccaggttttccac

SEQ ID NO: 8183 - DNA, 23 bp, Artificial Sequence
  human ApoB siRNA sequence
aaatcccatccaggttttccaca

SEQ ID NO: 8184 - DNA, 23 bp, Artificial Sequence
  human ApoB siRNA sequence
aatcccatccaggttttccacac

SEQ ID NO: 8185 - DNA, 23 bp, Artificial Sequence
  human ApoB siRNA sequence
atcccatccaggttttccacacc

SEQ ID NO: 8186 - DNA, 23 bp, Artificial Sequence
  human ApoB siRNA sequence
tcccatccaggttttccacacca

SEQ ID NO: 8187 - DNA, 23 bp, Artificial Sequence
  human ApoB siRNA sequence
cccatccaggttttccacaccag

SEQ ID NO: 8188 - DNA, 23 bp, Artificial Sequence
  human ApoB siRNA sequence
ccatccaggttttccacaccaga

SEQ ID NO: 8189 - DNA, 23 bp, Artificial Sequence
  human ApoB siRNA sequence
catccaggttttccacaccagaa

SEQ ID NO: 8190 - DNA, 23 bp, Artificial Sequence
  human ApoB siRNA sequence
atccaggttttccacaccagaat

SEQ ID NO: 8191 - DNA, 23 bp, Artificial Sequence
  human ApoB siRNA sequence
tccaggttttccacaccagaatt

SEQ ID NO: 8192 - DNA, 23 bp, Artificial Sequence
  human ApoB siRNA sequence
ccaggttttccacaccagaattt

SEQ ID NO: 8193 - DNA, 23 bp, Artificial Sequence
  human ApoB siRNA sequence
caggttttccacaccagaattta

SEQ ID NO: 8194 - DNA, 23 bp, Artificial Sequence
  human ApoB siRNA sequence
aggttttccacaccagaatttac

SEQ ID NO: 8195 - DNA, 23 bp, Artificial Sequence
  human ApoB siRNA sequence
ggttttccacaccagaatttacc

SEQ ID NO: 8196 - DNA, 23 bp, Artificial Sequence
  human ApoB siRNA sequence
gttttccacaccagaatttacca

SEQ ID NO: 8197 - DNA, 23 bp, Artificial Sequence
  human ApoB siRNA sequence
ttttccacaccagaatttaccat

SEQ ID NO: 8198 - DNA, 23 bp, Artificial Sequence
  human ApoB siRNA sequence
tttccacaccagaatttaccatc

SEQ ID NO: 8199 - DNA, 23 bp, Artificial Sequence
  human ApoB siRNA sequence
ttccacaccagaatttaccatcc

SEQ ID NO: 8200 - DNA, 23 bp, Artificial Sequence
  human ApoB siRNA sequence
tccacaccagaatttaccatcct

SEQ ID NO: 8201 - DNA, 23 bp, Artificial Sequence
  human ApoB siRNA sequence
ccacaccagaatttaccatcctt

SEQ ID NO: 8202 - DNA, 23 bp, Artificial Sequence
  human ApoB siRNA sequence
cacaccagaatttaccatcctta

SEQ ID NO: 8203 - DNA, 23 bp, Artificial Sequence
  human ApoB siRNA sequence
acaccagaatttaccatccttaa

SEQ ID NO: 8204 - DNA, 23 bp, Artificial Sequence
  human ApoB siRNA sequence
caccagaatttaccatccttaac

SEQ ID NO: 8205 - DNA, 23 bp, Artificial Sequence
  human ApoB siRNA sequence
accagaatttaccatccttaaca

SEQ ID NO: 8206 - DNA, 23 bp, Artificial Sequence
  human ApoB siRNA sequence
ccagaatttaccatccttaacac

SEQ ID NO: 8207 - DNA, 23 bp, Artificial Sequence
  human ApoB siRNA sequence
cagaatttaccatccttaacacc

SEQ ID NO: 8208 - DNA, 23 bp, Artificial Sequence
  human ApoB siRNA sequence
agaatttaccatccttaacacct

SEQ ID NO: 8209 - DNA, 23 bp, Artificial Sequence
  human ApoB siRNA sequence
gaatttaccatccttaacacctt

SEQ ID NO: 8210 - DNA, 23 bp, Artificial Sequence
  human ApoB siRNA sequence
aatttaccatccttaacaccttc

SEQ ID NO: 8211 - DNA, 23 bp, Artificial Sequence
  human ApoB siRNA sequence
atttaccatccttaacaccttcc

SEQ ID NO: 8212 - DNA, 23 bp, Artificial Sequence
  human ApoB siRNA sequence
tttaccatccttaacaccttcca

SEQ ID NO: 8213 - DNA, 23 bp, Artificial Sequence
  human ApoB siRNA sequence
ttaccatccttaacaccttccac

SEQ ID NO: 8214 - DNA, 23 bp, Artificial Sequence
  human ApoB siRNA sequence
taccatccttaacaccttccaca

SEQ ID NO: 8215 - DNA, 23 bp, Artificial Sequence
  human ApoB siRNA sequence
accatccttaacaccttccacat

SEQ ID NO: 8216 - DNA, 23 bp, Artificial Sequence
  human ApoB siRNA sequence
ccatccttaacaccttccacatt

SEQ ID NO: 8217 - DNA, 23 bp, Artificial Sequence
  human ApoB siRNA sequence
catccttaacaccttccacattc

SEQ ID NO: 8218 - DNA, 23 bp, Artificial Sequence
  human ApoB siRNA sequence
atccttaacaccttccacattcc

SEQ ID NO: 8219 - DNA, 23 bp, Artificial Sequence
  human ApoB siRNA sequence
tccttaacaccttccacattcct

SEQ ID NO: 8220 - DNA, 23 bp, Artificial Sequence
  human ApoB siRNA sequence
ccttaacaccttccacattcctt

SEQ ID NO: 8221 - DNA, 23 bp, Artificial Sequence
  human ApoB siRNA sequence
cttaacaccttccacattccttc

SEQ ID NO: 8222 - DNA, 23 bp, Artificial Sequence
  human ApoB siRNA sequence
ttaacaccttccacattccttcc

SEQ ID NO: 8223 - DNA, 23 bp, Artificial Sequence
  human ApoB siRNA sequence
taacaccttccacattccttcct

SEQ ID NO: 8224 - DNA, 23 bp, Artificial Sequence
  human ApoB siRNA sequence
aacaccttccacattccttcctt

SEQ ID NO: 8225 - DNA, 23 bp, Artificial Sequence
  human ApoB siRNA sequence
acaccttccacattccttccttt

SEQ ID NO: 8226 - DNA, 23 bp, Artificial Sequence
  human ApoB siRNA sequence
caccttccacattccttccttta

SEQ ID NO: 8227 - DNA, 23 bp, Artificial Sequence
  human ApoB siRNA sequence
accttccacattccttcctttac

SEQ ID NO: 8228 - DNA, 23 bp, Artificial Sequence
  human ApoB siRNA sequence
ccttccacattccttcctttaca

SEQ ID NO: 8229 - DNA, 23 bp, Artificial Sequence
  human ApoB siRNA sequence
cttccacattccttcctttacaa

SEQ ID NO: 8230 - DNA, 23 bp, Artificial Sequence
  human ApoB siRNA sequence
ttccacattccttcctttacaat

SEQ ID NO: 8231 - DNA, 23 bp, Artificial Sequence
  human ApoB siRNA sequence
tccacattccttcctttacaatt

SEQ ID NO: 8232 - DNA, 23 bp, Artificial Sequence
  human ApoB siRNA sequence
ccacattccttcctttacaattg

SEQ ID NO: 8233 - DNA, 23 bp, Artificial Sequence
  human ApoB siRNA sequence
cacattccttcctttacaattga

SEQ ID NO: 8234 - DNA, 23 bp, Artificial Sequence
  human ApoB siRNA sequence
acattccttcctttacaattgac

SEQ ID NO: 8235 - DNA, 23 bp, Artificial Sequence
  human ApoB siRNA sequence
cattccttcctttacaattgact

SEQ ID NO: 8236 - DNA, 23 bp, Artificial Sequence
  human ApoB siRNA sequence
attccttcctttacaattgactt

SEQ ID NO: 8237 - DNA, 23 bp, Artificial Sequence
  human ApoB siRNA sequence
ttccttcctttacaattgacttt

SEQ ID NO: 8238 - DNA, 23 bp, Artificial Sequence
  human ApoB siRNA sequence
tccttcctttacaattgactttg

SEQ ID NO: 8239 - DNA, 23 bp, Artificial Sequence
  human ApoB siRNA sequence
ccttcctttacaattgactttgt

SEQ ID NO: 8240 - DNA, 23 bp, Artificial Sequence
  human ApoB siRNA sequence
cttcctttacaattgactttgtc

SEQ ID NO: 8241 - DNA, 23 bp, Artificial Sequence
  human ApoB siRNA sequence
ttcctttacaattgactttgtcg

SEQ ID NO: 8242 - DNA, 23 bp, Artificial Sequence
  human ApoB siRNA sequence
tcctttacaattgactttgtcga

SEQ ID NO: 8243 - DNA, 23 bp, Artificial Sequence
  human ApoB siRNA sequence
cctttacaattgactttgtcgaa

SEQ ID NO: 8244 - DNA, 23 bp, Artificial Sequence
  human ApoB siRNA sequence
ctttacaattgactttgtcgaaa

SEQ ID NO: 8245 - DNA, 23 bp, Artificial Sequence
  human ApoB siRNA sequence
tttacaattgactttgtcgaaat

SEQ ID NO: 8246 - DNA, 23 bp, Artificial Sequence
  human ApoB siRNA sequence
ttacaattgactttgtcgaaatg

SEQ ID NO: 8247 - DNA, 23 bp, Artificial Sequence
  human ApoB siRNA sequence
tacaattgactttgtcgaaatga

SEQ ID NO: 8248 - DNA, 23 bp, Artificial Sequence
  human ApoB siRNA sequence
acaattgactttgtcgaaatgaa

SEQ ID NO: 8249 - DNA, 23 bp, Artificial Sequence
  human ApoB siRNA sequence
caattgactttgtcgaaatgaaa

SEQ ID NO: 8250 - DNA, 23 bp, Artificial Sequence
  human ApoB siRNA sequence
aattgactttgtcgaaatgaaag

SEQ ID NO: 8251 - DNA, 23 bp, Artificial Sequence
  human ApoB siRNA sequence
attgactttgtcgaaatgaaagt

SEQ ID NO: 8252 - DNA, 23 bp, Artificial Sequence
  human ApoB siRNA sequence
ttgactttgtcgaaatgaaagta

SEQ ID NO: 8253 - DNA, 23 bp, Artificial Sequence
  human ApoB siRNA sequence
tgactttgtcgaaatgaaagtaa

SEQ ID NO: 8254 - DNA, 23 bp, Artificial Sequence
  human ApoB siRNA sequence
gactttgtcgaaatgaaagtaaa

SEQ ID NO: 8255 - DNA, 23 bp, Artificial Sequence
  human ApoB siRNA sequence
actttgtcgaaatgaaagtaaag

SEQ ID NO: 8256 - DNA, 23 bp, Artificial Sequence
  human ApoB siRNA sequence
ctttgtcgaaatgaaagtaaaga

SEQ ID NO: 8257 - DNA, 23 bp, Artificial Sequence
  human ApoB siRNA sequence
tttgtcgaaatgaaagtaaagat

SEQ ID NO: 8258 - DNA, 23 bp, Artificial Sequence
  human ApoB siRNA sequence
ttgtcgaaatgaaagtaaagatc

SEQ ID NO: 8259 - DNA, 23 bp, Artificial Sequence
  human ApoB siRNA sequence
tgtcgaaatgaaagtaaagatca

SEQ ID NO: 8260 - DNA, 23 bp, Artificial Sequence
  human ApoB siRNA sequence
gtcgaaatgaaagtaaagatcat

SEQ ID NO: 8261 - DNA, 23 bp, Artificial Sequence
  human ApoB siRNA sequence
tcgaaatgaaagtaaagatcatc

SEQ ID NO: 8262 - DNA, 23 bp, Artificial Sequence
  human ApoB siRNA sequence
cgaaatgaaagtaaagatcatca

SEQ ID NO: 8263 - DNA, 23 bp, Artificial Sequence
  human ApoB siRNA sequence
gaaatgaaagtaaagatcatcag

SEQ ID NO: 8264 - DNA, 23 bp, Artificial Sequence
  human ApoB siRNA sequence
aaatgaaagtaaagatcatcaga

SEQ ID NO: 8265 - DNA, 23 bp, Artificial Sequence
  human ApoB siRNA sequence
aatgaaagtaaagatcatcagaa

SEQ ID NO: 8266 - DNA, 23 bp, Artificial Sequence
  human ApoB siRNA sequence
atgaaagtaaagatcatcagaac

SEQ ID NO: 8267 - DNA, 23 bp, Artificial Sequence
  human ApoB siRNA sequence
tgaaagtaaagatcatcagaacc

SEQ ID NO: 8268 - DNA, 23 bp, Artificial Sequence
  human ApoB siRNA sequence
gaaagtaaagatcatcagaacca

SEQ ID NO: 8269 - DNA, 23 bp, Artificial Sequence
  human ApoB siRNA sequence
aaagtaaagatcatcagaaccat

SEQ ID NO: 8270 - DNA, 23 bp, Artificial Sequence
  human ApoB siRNA sequence
aagtaaagatcatcagaaccatt

SEQ ID NO: 8271 - DNA, 23 bp, Artificial Sequence
  human ApoB siRNA sequence
agtaaagatcatcagaaccattg

SEQ ID NO: 8272 - DNA, 23 bp, Artificial Sequence
  human ApoB siRNA sequence
gtaaagatcatcagaaccattga

SEQ ID NO: 8273 - DNA, 23 bp, Artificial Sequence
  human ApoB siRNA sequence
taaagatcatcagaaccattgac

SEQ ID NO: 8274 - DNA, 23 bp, Artificial Sequence
  human ApoB siRNA sequence
aaagatcatcagaaccattgacc

SEQ ID NO: 8275 - DNA, 23 bp, Artificial Sequence
  human ApoB siRNA sequence
aagatcatcagaaccattgacca

SEQ ID NO: 8276 - DNA, 23 bp, Artificial Sequence
  human ApoB siRNA sequence
agatcatcagaaccattgaccag

SEQ ID NO: 8277 - DNA, 23 bp, Artificial Sequence
  human ApoB siRNA sequence
gatcatcagaaccattgaccaga

SEQ ID NO: 8278 - DNA, 23 bp, Artificial Sequence
  human ApoB siRNA sequence
atcatcagaaccattgaccagat

SEQ ID NO: 8279 - DNA, 23 bp, Artificial Sequence
  human ApoB siRNA sequence
tcatcagaaccattgaccagatg

SEQ ID NO: 8280 - DNA, 23 bp, Artificial Sequence
  human ApoB siRNA sequence
catcagaaccattgaccagatgc

SEQ ID NO: 8281 - DNA, 23 bp, Artificial Sequence
  human ApoB siRNA sequence
atcagaaccattgaccagatgca

SEQ ID NO: 8282 - DNA, 23 bp, Artificial Sequence
  human ApoB siRNA sequence
tcagaaccattgaccagatgcag

SEQ ID NO: 8283 - DNA, 23 bp, Artificial Sequence
  human ApoB siRNA sequence
cagaaccattgaccagatgcaga

SEQ ID NO: 8284 - DNA, 23 bp, Artificial Sequence
  human ApoB siRNA sequence
agaaccattgaccagatgcagaa

SEQ ID NO: 8285 - DNA, 23 bp, Artificial Sequence
  human ApoB siRNA sequence
gaaccattgaccagatgcagaac

SEQ ID NO: 8286 - DNA, 23 bp, Artificial Sequence
  human ApoB siRNA sequence
aaccattgaccagatgcagaaca

SEQ ID NO: 8287 - DNA, 23 bp, Artificial Sequence
  human ApoB siRNA sequence
accattgaccagatgcagaacag

SEQ ID NO: 8288 - DNA, 23 bp, Artificial Sequence
  human ApoB siRNA sequence
ccattgaccagatgcagaacagt

SEQ ID NO: 8289 - DNA, 23 bp, Artificial Sequence
  human ApoB siRNA sequence
cattgaccagatgcagaacagtg

SEQ ID NO: 8290 - DNA, 23 bp, Artificial Sequence
  human ApoB siRNA sequence
attgaccagatgcagaacagtga

SEQ ID NO: 8291 - DNA, 23 bp, Artificial Sequence
  human ApoB siRNA sequence
ttgaccagatgcagaacagtgag

SEQ ID NO: 8292 - DNA, 23 bp, Artificial Sequence
  human ApoB siRNA sequence
tgaccagatgcagaacagtgagc

SEQ ID NO: 8293 - DNA, 23 bp, Artificial Sequence
  human ApoB siRNA sequence
gaccagatgcagaacagtgagct

SEQ ID NO: 8294 - DNA, 23 bp, Artificial Sequence
  human ApoB siRNA sequence
accagatgcagaacagtgagctg

SEQ ID NO: 8295 - DNA, 23 bp, Artificial Sequence
  human ApoB siRNA sequence
ccagatgcagaacagtgagctgc

SEQ ID NO: 8296 - DNA, 23 bp, Artificial Sequence
  human ApoB siRNA sequence
cagatgcagaacagtgagctgca

SEQ ID NO: 8297 - DNA, 23 bp, Artificial Sequence
  human ApoB siRNA sequence
agatgcagaacagtgagctgcag

SEQ ID NO: 8298 - DNA, 23 bp, Artificial Sequence
  human ApoB siRNA sequence
gatgcagaacagtgagctgcagt

SEQ ID NO: 8299 - DNA, 23 bp, Artificial Sequence
  human ApoB siRNA sequence
atgcagaacagtgagctgcagtg

SEQ ID NO: 8300 - DNA, 23 bp, Artificial Sequence
  human ApoB siRNA sequence
tgcagaacagtgagctgcagtgg

SEQ ID NO: 8301 - DNA, 23 bp, Artificial Sequence
  human ApoB siRNA sequence
gcagaacagtgagctgcagtggc

SEQ ID NO: 8302 - DNA, 23 bp, Artificial Sequence
  human ApoB siRNA sequence
cagaacagtgagctgcagtggcc

SEQ ID NO: 8303 - DNA, 23 bp, Artificial Sequence
  human ApoB siRNA sequence
agaacagtgagctgcagtggccc

SEQ ID NO: 8304 - DNA, 23 bp, Artificial Sequence
  human ApoB siRNA sequence
gaacagtgagctgcagtggcccg

SEQ ID NO: 8305 - DNA, 23 bp, Artificial Sequence
  human ApoB siRNA sequence
aacagtgagctgcagtggcccgt

SEQ ID NO: 8306 - DNA, 23 bp, Artificial Sequence
  human ApoB siRNA sequence
acagtgagctgcagtggcccgtt

SEQ ID NO: 8307 - DNA, 23 bp, Artificial Sequence
  human ApoB siRNA sequence
cagtgagctgcagtggcccgttc

SEQ ID NO: 8308 - DNA, 23 bp, Artificial Sequence
  human ApoB siRNA sequence
agtgagctgcagtggcccgttcc

SEQ ID NO: 8309 - DNA, 23 bp, Artificial Sequence
  human ApoB siRNA sequence
gtgagctgcagtggcccgttcca

SEQ ID NO: 8310 - DNA, 23 bp, Artificial Sequence
  human ApoB siRNA sequence
tgagctgcagtggcccgttccag

SEQ ID NO: 8311 - DNA, 23 bp, Artificial Sequence
  human ApoB siRNA sequence
gagctgcagtggcccgttccaga

SEQ ID NO: 8312 - DNA, 23 bp, Artificial Sequence
  human ApoB siRNA sequence
agctgcagtggcccgttccagat

SEQ ID NO: 8313 - DNA, 23 bp, Artificial Sequence
  human ApoB siRNA sequence
gctgcagtggcccgttccagata

SEQ ID NO: 8314 - DNA, 23 bp, Artificial Sequence
  human ApoB siRNA sequence
ctgcagtggcccgttccagatat

SEQ ID NO: 8315 - DNA, 23 bp, Artificial Sequence
  human ApoB siRNA sequence
tgcagtggcccgttccagatata

SEQ ID NO: 8316 - DNA, 23 bp, Artificial Sequence
  human ApoB siRNA sequence
gcagtggcccgttccagatatat

SEQ ID NO: 8317 - DNA, 23 bp, Artificial Sequence
  human ApoB siRNA sequence
cagtggcccgttccagatatata

SEQ ID NO: 8318 - DNA, 23 bp, Artificial Sequence
  human ApoB siRNA sequence
agtggcccgttccagatatatat

SEQ ID NO: 8319 - DNA, 23 bp, Artificial Sequence
  human ApoB siRNA sequence
gtggcccgttccagatatatatc

SEQ ID NO: 8320 - DNA, 23 bp, Artificial Sequence
  human ApoB siRNA sequence
tggcccgttccagatatatatct

SEQ ID NO: 8321 - DNA, 23 bp, Artificial Sequence
  human ApoB siRNA sequence
ggcccgttccagatatatatctc

SEQ ID NO: 8322 - DNA, 23 bp, Artificial Sequence
  human ApoB siRNA sequence
gcccgttccagatatatatctca

SEQ ID NO: 8323 - DNA, 23 bp, Artificial Sequence
  human ApoB siRNA sequence
cccgttccagatatatatctcag

SEQ ID NO: 8324 - DNA, 23 bp, Artificial Sequence
  human ApoB siRNA sequence
ccgttccagatatatatctcagg

SEQ ID NO: 8325 - DNA, 23 bp, Artificial Sequence
  human ApoB siRNA sequence
cgttccagatatatatctcaggg

SEQ ID NO: 8326 - DNA, 23 bp, Artificial Sequence
  human ApoB siRNA sequence
gttccagatatatatctcaggga

SEQ ID NO: 8327 - DNA, 23 bp, Artificial Sequence
  human ApoB siRNA sequence
ttccagatatatatctcagggat

SEQ ID NO: 8328 - DNA, 23 bp, Artificial Sequence
  human ApoB siRNA sequence
tccagatatatatctcagggatc

SEQ ID NO: 8329 - DNA, 23 bp, Artificial Sequence
  human ApoB siRNA sequence
ccagatatatatctcagggatct

SEQ ID NO: 8330 - DNA, 23 bp, Artificial Sequence
  human ApoB siRNA sequence
cagatatatatctcagggatctg

SEQ ID NO: 8331 - DNA, 23 bp, Artificial Sequence
  human ApoB siRNA sequence
agatatatatctcagggatctga

SEQ ID NO: 8332 - DNA, 23 bp, Artificial Sequence
  human ApoB siRNA sequence
gatatatatctcagggatctgaa

SEQ ID NO: 8333 - DNA, 23 bp, Artificial Sequence
  human ApoB siRNA sequence
atatatatctcagggatctgaag

SEQ ID NO: 8334 - DNA, 23 bp, Artificial Sequence
  human ApoB siRNA sequence
tatatatctcagggatctgaagg

SEQ ID NO: 8335 - DNA, 23 bp, Artificial Sequence
  human ApoB siRNA sequence
atatatctcagggatctgaaggt

SEQ ID NO: 8336 - DNA, 23 bp, Artificial Sequence
  human ApoB siRNA sequence
tatatctcagggatctgaaggtg

SEQ ID NO: 8337 - DNA, 23 bp, Artificial Sequence
  human ApoB siRNA sequence
atatctcagggatctgaaggtgg

SEQ ID NO: 8338 - DNA, 23 bp, Artificial Sequence
  human ApoB siRNA sequence
tatctcagggatctgaaggtgga

SEQ ID NO: 8339 - DNA, 23 bp, Artificial Sequence
  human ApoB siRNA sequence
atctcagggatctgaaggtggag

SEQ ID NO: 8340 - DNA, 23 bp, Artificial Sequence
  human ApoB siRNA sequence
tctcagggatctgaaggtggagg

SEQ ID NO: 8341 - DNA, 23 bp, Artificial Sequence
  human ApoB siRNA sequence
ctcagggatctgaaggtggagga

SEQ ID NO: 8342 - DNA, 23 bp, Artificial Sequence
  human ApoB siRNA sequence
tcagggatctgaaggtggaggac

SEQ ID NO: 8343 - DNA, 23 bp, Artificial Sequence
  human ApoB siRNA sequence
cagggatctgaaggtggaggaca

SEQ ID NO: 8344 - DNA, 23 bp, Artificial Sequence
  human ApoB siRNA sequence
agggatctgaaggtggaggacat

SEQ ID NO: 8345 - DNA, 23 bp, Artificial Sequence
  human ApoB siRNA sequence
gggatctgaaggtggaggacatt

SEQ ID NO: 8346 - DNA, 23 bp, Artificial Sequence
  human ApoB siRNA sequence
ggatctgaaggtggaggacattc

SEQ ID NO: 8347 - DNA, 23 bp, Artificial Sequence
  human ApoB siRNA sequence
gatctgaaggtggaggacattcc

SEQ ID NO: 8348 - DNA, 23 bp, Artificial Sequence
  human ApoB siRNA sequence
atctgaaggtggaggacattcct

SEQ ID NO: 8349 - DNA, 23 bp, Artificial Sequence
  human ApoB siRNA sequence
tctgaaggtggaggacattcctc

SEQ ID NO: 8350 - DNA, 23 bp, Artificial Sequence
  human ApoB siRNA sequence
ctgaaggtggaggacattcctct

SEQ ID NO: 8351 - DNA, 23 bp, Artificial Sequence
  human ApoB siRNA sequence
tgaaggtggaggacattcctcta

SEQ ID NO: 8352 - DNA, 23 bp, Artificial Sequence
  human ApoB siRNA sequence
gaaggtggaggacattcctctag

SEQ ID NO: 8353 - DNA, 23 bp, Artificial Sequence
  human ApoB siRNA sequence
aaggtggaggacattcctctagc

SEQ ID NO: 8354 - DNA, 23 bp, Artificial Sequence
  human ApoB siRNA sequence
aggtggaggacattcctctagcg

SEQ ID NO: 8355 - DNA, 23 bp, Artificial Sequence
  human ApoB siRNA sequence
ggtggaggacattcctctagcga

SEQ ID NO: 8356 - DNA, 23 bp, Artificial Sequence
  human ApoB siRNA sequence
gtggaggacattcctctagcgag

SEQ ID NO: 8357 - DNA, 23 bp, Artificial Sequence
  human ApoB siRNA sequence
tggaggacattcctctagcgaga

SEQ ID NO: 8358 - DNA, 23 bp, Artificial Sequence
  human ApoB siRNA sequence
ggaggacattcctctagcgagaa

SEQ ID NO: 8359 - DNA, 23 bp, Artificial Sequence
  human ApoB siRNA sequence
gaggacattcctctagcgagaat

SEQ ID NO: 8360 - DNA, 23 bp, Artificial Sequence
  human ApoB siRNA sequence
aggacattcctctagcgagaatc

SEQ ID NO: 8361 - DNA, 23 bp, Artificial Sequence
  human ApoB siRNA sequence
ggacattcctctagcgagaatca

SEQ ID NO: 8362 - DNA, 23 bp, Artificial Sequence
  human ApoB siRNA sequence
gacattcctctagcgagaatcac

SEQ ID NO: 8363 - DNA, 23 bp, Artificial Sequence
  human ApoB siRNA sequence
acattcctctagcgagaatcacc

SEQ ID NO: 8364 - DNA, 23 bp, Artificial Sequence
  human ApoB siRNA sequence
cattcctctagcgagaatcaccc

SEQ ID NO: 8365 - DNA, 23 bp, Artificial Sequence
  human ApoB siRNA sequence
attcctctagcgagaatcaccct

SEQ ID NO: 8366 - DNA, 23 bp, Artificial Sequence
  human ApoB siRNA sequence
ttcctctagcgagaatcaccctg

SEQ ID NO: 8367 - DNA, 23 bp, Artificial Sequence
  human ApoB siRNA sequence
tcctctagcgagaatcaccctgc

SEQ ID NO: 8368 - DNA, 23 bp, Artificial Sequence
  human ApoB siRNA sequence
cctctagcgagaatcaccctgcc

SEQ ID NO: 8369 - DNA, 23 bp, Artificial Sequence
  human ApoB siRNA sequence
ctctagcgagaatcaccctgcca

SEQ ID NO: 8370 - DNA, 23 bp, Artificial Sequence
  human ApoB siRNA sequence
tctagcgagaatcaccctgccag

SEQ ID NO: 8371 - DNA, 23 bp, Artificial Sequence
  human ApoB siRNA sequence
ctagcgagaatcaccctgccaga

SEQ ID NO: 8372 - DNA, 23 bp, Artificial Sequence
  human ApoB siRNA sequence
tagcgagaatcaccctgccagac

SEQ ID NO: 8373 - DNA, 23 bp, Artificial Sequence
  human ApoB siRNA sequence
agcgagaatcaccctgccagact

SEQ ID NO: 8374 - DNA, 23 bp, Artificial Sequence
  human ApoB siRNA sequence
gcgagaatcaccctgccagactt

SEQ ID NO: 8375 - DNA, 23 bp, Artificial Sequence
  human ApoB siRNA sequence
cgagaatcaccctgccagacttc

SEQ ID NO: 8376 - DNA, 23 bp, Artificial Sequence
  human ApoB siRNA sequence
gagaatcaccctgccagacttcc

SEQ ID NO: 8377 - DNA, 23 bp, Artificial Sequence
  human ApoB siRNA sequence
agaatcaccctgccagacttccg

SEQ ID NO: 8378 - DNA, 23 bp, Artificial Sequence
  human ApoB siRNA sequence
gaatcaccctgccagacttccgt

SEQ ID NO: 8379 - DNA, 23 bp, Artificial Sequence
  human ApoB siRNA sequence
aatcaccctgccagacttccgtt

SEQ ID NO: 8380 - DNA, 23 bp, Artificial Sequence
  human ApoB siRNA sequence
atcaccctgccagacttccgttt

SEQ ID NO: 8381 - DNA, 23 bp, Artificial Sequence
  human ApoB siRNA sequence
tcaccctgccagacttccgttta

SEQ ID NO: 8382 - DNA, 23 bp, Artificial Sequence
  human ApoB siRNA sequence
caccctgccagacttccgtttac

SEQ ID NO: 8383 - DNA, 23 bp, Artificial Sequence
  human ApoB siRNA sequence
accctgccagacttccgtttacc

SEQ ID NO: 8384 - DNA, 23 bp, Artificial Sequence
  human ApoB siRNA sequence
ccctgccagacttccgtttacca

SEQ ID NO: 8385 - DNA, 23 bp, Artificial Sequence
  human ApoB siRNA sequence
cctgccagacttccgtttaccag

SEQ ID NO: 8386 - DNA, 23 bp, Artificial Sequence
  human ApoB siRNA sequence
ctgccagacttccgtttaccaga

SEQ ID NO: 8387 - DNA, 23 bp, Artificial Sequence
  human ApoB siRNA sequence
tgccagacttccgtttaccagaa

SEQ ID NO: 8388 - DNA, 23 bp, Artificial Sequence
  human ApoB siRNA sequence
gccagacttccgtttaccagaaa

SEQ ID NO: 8389 - DNA, 23 bp, Artificial Sequence
  human ApoB siRNA sequence
ccagacttccgtttaccagaaat

SEQ ID NO: 8390 - DNA, 23 bp, Artificial Sequence
  human ApoB siRNA sequence
cagacttccgtttaccagaaatc

SEQ ID NO: 8391 - DNA, 23 bp, Artificial Sequence
  human ApoB siRNA sequence
agacttccgtttaccagaaatcg

SEQ ID NO: 8392 - DNA, 23 bp, Artificial Sequence
  human ApoB siRNA sequence
gacttccgtttaccagaaatcgc

SEQ ID NO: 8393 - DNA, 23 bp, Artificial Sequence
  human ApoB siRNA sequence
acttccgtttaccagaaatcgca

SEQ ID NO: 8394 - DNA, 23 bp, Artificial Sequence
  human ApoB siRNA sequence
cttccgtttaccagaaatcgcaa

SEQ ID NO: 8395 - DNA, 23 bp, Artificial Sequence
  human ApoB siRNA sequence
ttccgtttaccagaaatcgcaat

SEQ ID NO: 8396 - DNA, 23 bp, Artificial Sequence
  human ApoB siRNA sequence
tccgtttaccagaaatcgcaatt

SEQ ID NO: 8397 - DNA, 23 bp, Artificial Sequence
  human ApoB siRNA sequence
ccgtttaccagaaatcgcaattc

SEQ ID NO: 8398 - DNA, 23 bp, Artificial Sequence
  human ApoB siRNA sequence
cgtttaccagaaatcgcaattcc

SEQ ID NO: 8399 - DNA, 23 bp, Artificial Sequence
  human ApoB siRNA sequence
gtttaccagaaatcgcaattcca

SEQ ID NO: 8400 - DNA, 23 bp, Artificial Sequence
  human ApoB siRNA sequence
tttaccagaaatcgcaattccag

SEQ ID NO: 8401 - DNA, 23 bp, Artificial Sequence
  human ApoB siRNA sequence
ttaccagaaatcgcaattccaga

SEQ ID NO: 8402 - DNA, 23 bp, Artificial Sequence
  human ApoB siRNA sequence
taccagaaatcgcaattccagaa

SEQ ID NO: 8403 - DNA, 23 bp, Artificial Sequence
  human ApoB siRNA sequence
accagaaatcgcaattccagaat

SEQ ID NO: 8404 - DNA, 23 bp, Artificial Sequence
  human ApoB siRNA sequence
ccagaaatcgcaattccagaatt

SEQ ID NO: 8405 - DNA, 23 bp, Artificial Sequence
  human ApoB siRNA sequence
cagaaatcgcaattccagaattc

SEQ ID NO: 8406 - DNA, 23 bp, Artificial Sequence
  human ApoB siRNA sequence
agaaatcgcaattccagaattca

SEQ ID NO: 8407 - DNA, 23 bp, Artificial Sequence
  human ApoB siRNA sequence
gaaatcgcaattccagaattcat

SEQ ID NO: 8408 - DNA, 23 bp, Artificial Sequence
  human ApoB siRNA sequence
aaatcgcaattccagaattcata

SEQ ID NO: 8409 - DNA, 23 bp, Artificial Sequence
  human ApoB siRNA sequence
aatcgcaattccagaattcataa

SEQ ID NO: 8410 - DNA, 23 bp, Artificial Sequence
  human ApoB siRNA sequence
atcgcaattccagaattcataat

SEQ ID NO: 8411 - DNA, 23 bp, Artificial Sequence
  human ApoB siRNA sequence
tcgcaattccagaattcataatc

SEQ ID NO: 8412 - DNA, 23 bp, Artificial Sequence
  human ApoB siRNA sequence
cgcaattccagaattcataatcc

SEQ ID NO: 8413 - DNA, 23 bp, Artificial Sequence
  human ApoB siRNA sequence
gcaattccagaattcataatccc

SEQ ID NO: 8414 - DNA, 23 bp, Artificial Sequence
  human ApoB siRNA sequence
caattccagaattcataatccca

SEQ ID NO: 8415 - DNA, 23 bp, Artificial Sequence
  human ApoB siRNA sequence
aattccagaattcataatcccaa

SEQ ID NO: 8416 - DNA, 23 bp, Artificial Sequence
  human ApoB siRNA sequence
attccagaattcataatcccaac

SEQ ID NO: 8417 - DNA, 23 bp, Artificial Sequence
  human ApoB siRNA sequence
ttccagaattcataatcccaact

SEQ ID NO: 8418 - DNA, 23 bp, Artificial Sequence
  human ApoB siRNA sequence
tccagaattcataatcccaactc

SEQ ID NO: 8419 - DNA, 23 bp, Artificial Sequence
  human ApoB siRNA sequence
ccagaattcataatcccaactct

SEQ ID NO: 8420 - DNA, 23 bp, Artificial Sequence
  human ApoB siRNA sequence
cagaattcataatcccaactctc

SEQ ID NO: 8421 - DNA, 23 bp, Artificial Sequence
  human ApoB siRNA sequence
agaattcataatcccaactctca

SEQ ID NO: 8422 - DNA, 23 bp, Artificial Sequence
  human ApoB siRNA sequence
gaattcataatcccaactctcaa

SEQ ID NO: 8423 - DNA, 23 bp, Artificial Sequence
  human ApoB siRNA sequence
aattcataatcccaactctcaac

SEQ ID NO: 8424 - DNA, 23 bp, Artificial Sequence
  human ApoB siRNA sequence
attcataatcccaactctcaacc

SEQ ID NO: 8425 - DNA, 23 bp, Artificial Sequence
  human ApoB siRNA sequence
ttcataatcccaactctcaacct

SEQ ID NO: 8426 - DNA, 23 bp, Artificial Sequence
  human ApoB siRNA sequence
tcataatcccaactctcaacctt

SEQ ID NO: 8427 - DNA, 23 bp, Artificial Sequence
  human ApoB siRNA sequence
cataatcccaactctcaacctta

SEQ ID NO: 8428 - DNA, 23 bp, Artificial Sequence
  human ApoB siRNA sequence
ataatcccaactctcaaccttaa

SEQ ID NO: 8429 - DNA, 23 bp, Artificial Sequence
  human ApoB siRNA sequence
taatcccaactctcaaccttaat

SEQ ID NO: 8430 - DNA, 23 bp, Artificial Sequence
  human ApoB siRNA sequence
aatcccaactctcaaccttaatg

SEQ ID NO: 8431 - DNA, 23 bp, Artificial Sequence
  human ApoB siRNA sequence
atcccaactctcaaccttaatga

SEQ ID NO: 8432 - DNA, 23 bp, Artificial Sequence
  human ApoB siRNA sequence
tcccaactctcaaccttaatgat

SEQ ID NO: 8433 - DNA, 23 bp, Artificial Sequence
  human ApoB siRNA sequence
cccaactctcaaccttaatgatt

SEQ ID NO: 8434 - DNA, 23 bp, Artificial Sequence
  human ApoB siRNA sequence
ccaactctcaaccttaatgattt

SEQ ID NO: 8435 - DNA, 23 bp, Artificial Sequence
  human ApoB siRNA sequence
caactctcaaccttaatgatttt

SEQ ID NO: 8436 - DNA, 23 bp, Artificial Sequence
  human ApoB siRNA sequence
aactctcaaccttaatgattttc

SEQ ID NO: 8437 - DNA, 23 bp, Artificial Sequence
  human ApoB siRNA sequence
actctcaaccttaatgattttca

SEQ ID NO: 8438 - DNA, 23 bp, Artificial Sequence
  human ApoB siRNA sequence
ctctcaaccttaatgattttcaa

SEQ ID NO: 8439 - DNA, 23 bp, Artificial Sequence
  human ApoB siRNA sequence
tctcaaccttaatgattttcaag

SEQ ID NO: 8440 - DNA, 23 bp, Artificial Sequence
  human ApoB siRNA sequence
ctcaaccttaatgattttcaagt

SEQ ID NO: 8441 - DNA, 23 bp, Artificial Sequence
  human ApoB siRNA sequence
tcaaccttaatgattttcaagtt

SEQ ID NO: 8442 - DNA, 23 bp, Artificial Sequence
  human ApoB siRNA sequence
caaccttaatgattttcaagttc

SEQ ID NO: 8443 - DNA, 23 bp, Artificial Sequence
  human ApoB siRNA sequence
aaccttaatgattttcaagttcc

SEQ ID NO: 8444 - DNA, 23 bp, Artificial Sequence
  human ApoB siRNA sequence
accttaatgattttcaagttcct

SEQ ID NO: 8445 - DNA, 23 bp, Artificial Sequence
  human ApoB siRNA sequence
ccttaatgattttcaagttcctg

SEQ ID NO: 8446 - DNA, 23 bp, Artificial Sequence
  human ApoB siRNA sequence
cttaatgattttcaagttcctga

SEQ ID NO: 8447 - DNA, 23 bp, Artificial Sequence
  human ApoB siRNA sequence
ttaatgattttcaagttcctgac

SEQ ID NO: 8448 - DNA, 23 bp, Artificial Sequence
  human ApoB siRNA sequence
taatgattttcaagttcctgacc

SEQ ID NO: 8449 - DNA, 23 bp, Artificial Sequence
  human ApoB siRNA sequence
aatgattttcaagttcctgacct

SEQ ID NO: 8450 - DNA, 23 bp, Artificial Sequence
  human ApoB siRNA sequence
atgattttcaagttcctgacctt

SEQ ID NO: 8451 - DNA, 23 bp, Artificial Sequence
  human ApoB siRNA sequence
tgattttcaagttcctgaccttc

SEQ ID NO: 8452 - DNA, 23 bp, Artificial Sequence
  human ApoB siRNA sequence
gattttcaagttcctgaccttca

SEQ ID NO: 8453 - DNA, 23 bp, Artificial Sequence
  human ApoB siRNA sequence
attttcaagttcctgaccttcac

SEQ ID NO: 8454 - DNA, 23 bp, Artificial Sequence
  human ApoB siRNA sequence
ttttcaagttcctgaccttcaca

SEQ ID NO: 8455 - DNA, 23 bp, Artificial Sequence
  human ApoB siRNA sequence
tttcaagttcctgaccttcacat

SEQ ID NO: 8456 - DNA, 23 bp, Artificial Sequence
  human ApoB siRNA sequence
ttcaagttcctgaccttcacata

SEQ ID NO: 8457 - DNA, 23 bp, Artificial Sequence
  human ApoB siRNA sequence
tcaagttcctgaccttcacatac

SEQ ID NO: 8458 - DNA, 23 bp, Artificial Sequence
  human ApoB siRNA sequence
caagttcctgaccttcacatacc

SEQ ID NO: 8459 - DNA, 23 bp, Artificial Sequence
  human ApoB siRNA sequence
aagttcctgaccttcacatacca

SEQ ID NO: 8460 - DNA, 23 bp, Artificial Sequence
  human ApoB siRNA sequence
agttcctgaccttcacataccag

SEQ ID NO: 8461 - DNA, 23 bp, Artificial Sequence
  human ApoB siRNA sequence
gttcctgaccttcacataccaga

SEQ ID NO: 8462 - DNA, 23 bp, Artificial Sequence
  human ApoB siRNA sequence
ttcctgaccttcacataccagaa

SEQ ID NO: 8463 - DNA, 23 bp, Artificial Sequence
  human ApoB siRNA sequence
tcctgaccttcacataccagaat

SEQ ID NO: 8464 - DNA, 23 bp, Artificial Sequence
  human ApoB siRNA sequence
cctgaccttcacataccagaatt

SEQ ID NO: 8465 - DNA, 23 bp, Artificial Sequence
  human ApoB siRNA sequence
ctgaccttcacataccagaattc

SEQ ID NO: 8466 - DNA, 23 bp, Artificial Sequence
  human ApoB siRNA sequence
tgaccttcacataccagaattcc

SEQ ID NO: 8467 - DNA, 23 bp, Artificial Sequence
  human ApoB siRNA sequence
gaccttcacataccagaattcca

SEQ ID NO: 8468 - DNA, 23 bp, Artificial Sequence
  human ApoB siRNA sequence
accttcacataccagaattccag

SEQ ID NO: 8469 - DNA, 23 bp, Artificial Sequence
  human ApoB siRNA sequence
ccttcacataccagaattccagc

SEQ ID NO: 8470 - DNA, 23 bp, Artificial Sequence
  human ApoB siRNA sequence
cttcacataccagaattccagct

SEQ ID NO: 8471 - DNA, 23 bp, Artificial Sequence
  human ApoB siRNA sequence
ttcacataccagaattccagctt

SEQ ID NO: 8472 - DNA, 23 bp, Artificial Sequence
  human ApoB siRNA sequence
tcacataccagaattccagcttc

SEQ ID NO: 8473 - DNA, 23 bp, Artificial Sequence
  human ApoB siRNA sequence
cacataccagaattccagcttcc

SEQ ID NO: 8474 - DNA, 23 bp, Artificial Sequence
  human ApoB siRNA sequence
acataccagaattccagcttccc

SEQ ID NO: 8475 - DNA, 23 bp, Artificial Sequence
  human ApoB siRNA sequence
cataccagaattccagcttcccc

SEQ ID NO: 8476 - DNA, 23 bp, Artificial Sequence
  human ApoB siRNA sequence
ataccagaattccagcttcccca

SEQ ID NO: 8477 - DNA, 23 bp, Artificial Sequence
  human ApoB siRNA sequence
taccagaattccagcttccccac

SEQ ID NO: 8478 - DNA, 23 bp, Artificial Sequence
  human ApoB siRNA sequence
accagaattccagcttccccaca

SEQ ID NO: 8479 - DNA, 23 bp, Artificial Sequence
  human ApoB siRNA sequence
ccagaattccagcttccccacat

SEQ ID NO: 8480 - DNA, 23 bp, Artificial Sequence
  human ApoB siRNA sequence
cagaattccagcttccccacatc

SEQ ID NO: 8481 - DNA, 23 bp, Artificial Sequence
  human ApoB siRNA sequence
agaattccagcttccccacatct

SEQ ID NO: 8482 - DNA, 23 bp, Artificial Sequence
  human ApoB siRNA sequence
gaattccagcttccccacatctc

SEQ ID NO: 8483 - DNA, 23 bp, Artificial Sequence
  human ApoB siRNA sequence
aattccagcttccccacatctca

SEQ ID NO: 8484 - DNA, 23 bp, Artificial Sequence
  human ApoB siRNA sequence
attccagcttccccacatctcac

SEQ ID NO: 8485 - DNA, 23 bp, Artificial Sequence
  human ApoB siRNA sequence
ttccagcttccccacatctcaca

SEQ ID NO: 8486 - DNA, 23 bp, Artificial Sequence
  human ApoB siRNA sequence
tccagcttccccacatctcacac

SEQ ID NO: 8487 - DNA, 23 bp, Artificial Sequence
  human ApoB siRNA sequence
ccagcttccccacatctcacaca

SEQ ID NO: 8488 - DNA, 23 bp, Artificial Sequence
  human ApoB siRNA sequence
cagcttccccacatctcacacac

SEQ ID NO: 8489 - DNA, 23 bp, Artificial Sequence
  human ApoB siRNA sequence
agcttccccacatctcacacaca

SEQ ID NO: 8490 - DNA, 23 bp, Artificial Sequence
  human ApoB siRNA sequence
gcttccccacatctcacacacaa

SEQ ID NO: 8491 - DNA, 23 bp, Artificial Sequence
  human ApoB siRNA sequence
cttccccacatctcacacacaat

SEQ ID NO: 8492 - DNA, 23 bp, Artificial Sequence
  human ApoB siRNA sequence
ttccccacatctcacacacaatt

SEQ ID NO: 8493 - DNA, 23 bp, Artificial Sequence
  human ApoB siRNA sequence
tccccacatctcacacacaattg

SEQ ID NO: 8494 - DNA, 23 bp, Artificial Sequence
  human ApoB siRNA sequence
ccccacatctcacacacaattga

SEQ ID NO: 8495 - DNA, 23 bp, Artificial Sequence
  human ApoB siRNA sequence
cccacatctcacacacaattgaa

SEQ ID NO: 8496 - DNA, 23 bp, Artificial Sequence
  human ApoB siRNA sequence
ccacatctcacacacaattgaag

SEQ ID NO: 8497 - DNA, 23 bp, Artificial Sequence
  human ApoB siRNA sequence
cacatctcacacacaattgaagt

SEQ ID NO: 8498 - DNA, 23 bp, Artificial Sequence
  human ApoB siRNA sequence
acatctcacacacaattgaagta

SEQ ID NO: 8499 - DNA, 23 bp, Artificial Sequence
  human ApoB siRNA sequence
catctcacacacaattgaagtac

SEQ ID NO: 8500 - DNA, 23 bp, Artificial Sequence
  human ApoB siRNA sequence
atctcacacacaattgaagtacc

SEQ ID NO: 8501 - DNA, 23 bp, Artificial Sequence
  human ApoB siRNA sequence
tctcacacacaattgaagtacct

SEQ ID NO: 8502 - DNA, 23 bp, Artificial Sequence
  human ApoB siRNA sequence
ctcacacacaattgaagtaccta

SEQ ID NO: 8503 - DNA, 23 bp, Artificial Sequence
  human ApoB siRNA sequence
tcacacacaattgaagtacctac

SEQ ID NO: 8504 - DNA, 23 bp, Artificial Sequence
  human ApoB siRNA sequence
cacacacaattgaagtacctact

SEQ ID NO: 8505 - DNA, 23 bp, Artificial Sequence
  human ApoB siRNA sequence
acacacaattgaagtacctactt

SEQ ID NO: 8506 - DNA, 23 bp, Artificial Sequence
  human ApoB siRNA sequence
cacacaattgaagtacctacttt

SEQ ID NO: 8507 - DNA, 23 bp, Artificial Sequence
  human ApoB siRNA sequence
acacaattgaagtacctactttt

SEQ ID NO: 8508 - DNA, 23 bp, Artificial Sequence
  human ApoB siRNA sequence
cacaattgaagtacctacttttg

SEQ ID NO: 8509 - DNA, 23 bp, Artificial Sequence
  human ApoB siRNA sequence
acaattgaagtacctacttttgg

SEQ ID NO: 8510 - DNA, 23 bp, Artificial Sequence
  human ApoB siRNA sequence
caattgaagtacctacttttggc

SEQ ID NO: 8511 - DNA, 23 bp, Artificial Sequence
  human ApoB siRNA sequence
aattgaagtacctacttttggca

SEQ ID NO: 8512 - DNA, 23 bp, Artificial Sequence
  human ApoB siRNA sequence
attgaagtacctacttttggcaa

SEQ ID NO: 8513 - DNA, 23 bp, Artificial Sequence
  human ApoB siRNA sequence
ttgaagtacctacttttggcaag

SEQ ID NO: 8514 - DNA, 23 bp, Artificial Sequence
  human ApoB siRNA sequence
tgaagtacctacttttggcaagc

SEQ ID NO: 8515 - DNA, 23 bp, Artificial Sequence
  human ApoB siRNA sequence
gaagtacctacttttggcaagct

SEQ ID NO: 8516 - DNA, 23 bp, Artificial Sequence
  human ApoB siRNA sequence
aagtacctacttttggcaagcta

SEQ ID NO: 8517 - DNA, 23 bp, Artificial Sequence
  human ApoB siRNA sequence
agtacctacttttggcaagctat

SEQ ID NO: 8518 - DNA, 23 bp, Artificial Sequence
  human ApoB siRNA sequence
gtacctacttttggcaagctata

SEQ ID NO: 8519 - DNA, 23 bp, Artificial Sequence
  human ApoB siRNA sequence
tacctacttttggcaagctatac

SEQ ID NO: 8520 - DNA, 23 bp, Artificial Sequence
  human ApoB siRNA sequence
acctacttttggcaagctataca

SEQ ID NO: 8521 - DNA, 23 bp, Artificial Sequence
  human ApoB siRNA sequence
cctacttttggcaagctatacag

SEQ ID NO: 8522 - DNA, 23 bp, Artificial Sequence
  human ApoB siRNA sequence
ctacttttggcaagctatacagt

SEQ ID NO: 8523 - DNA, 23 bp, Artificial Sequence
  human ApoB siRNA sequence
tacttttggcaagctatacagta

SEQ ID NO: 8524 - DNA, 23 bp, Artificial Sequence
  human ApoB siRNA sequence
acttttggcaagctatacagtat

SEQ ID NO: 8525 - DNA, 23 bp, Artificial Sequence
  human ApoB siRNA sequence
cttttggcaagctatacagtatt

SEQ ID NO: 8526 - DNA, 23 bp, Artificial Sequence
  human ApoB siRNA sequence
ttttggcaagctatacagtattc

SEQ ID NO: 8527 - DNA, 23 bp, Artificial Sequence
  human ApoB siRNA sequence
tttggcaagctatacagtattct

SEQ ID NO: 8528 - DNA, 23 bp, Artificial Sequence
  human ApoB siRNA sequence
ttggcaagctatacagtattctg

SEQ ID NO: 8529 - DNA, 23 bp, Artificial Sequence
  human ApoB siRNA sequence
tggcaagctatacagtattctga

SEQ ID NO: 8530 - DNA, 23 bp, Artificial Sequence
  human ApoB siRNA sequence
ggcaagctatacagtattctgaa

SEQ ID NO: 8531 - DNA, 23 bp, Artificial Sequence
  human ApoB siRNA sequence
gcaagctatacagtattctgaaa

SEQ ID NO: 8532 - DNA, 23 bp, Artificial Sequence
  human ApoB siRNA sequence
caagctatacagtattctgaaaa

SEQ ID NO: 8533 - DNA, 23 bp, Artificial Sequence
  human ApoB siRNA sequence
aagctatacagtattctgaaaat

SEQ ID NO: 8534 - DNA, 23 bp, Artificial Sequence
  human ApoB siRNA sequence
agctatacagtattctgaaaatc

SEQ ID NO: 8535 - DNA, 23 bp, Artificial Sequence
  human ApoB siRNA sequence
gctatacagtattctgaaaatcc

SEQ ID NO: 8536 - DNA, 23 bp, Artificial Sequence
  human ApoB siRNA sequence
ctatacagtattctgaaaatcca

SEQ ID NO: 8537 - DNA, 23 bp, Artificial Sequence
  human ApoB siRNA sequence
tatacagtattctgaaaatccaa

SEQ ID NO: 8538 - DNA, 23 bp, Artificial Sequence
  human ApoB siRNA sequence
atacagtattctgaaaatccaat

SEQ ID NO: 8539 - DNA, 23 bp, Artificial Sequence
  human ApoB siRNA sequence
tacagtattctgaaaatccaatc

SEQ ID NO: 8540 - DNA, 23 bp, Artificial Sequence
  human ApoB siRNA sequence
acagtattctgaaaatccaatct

SEQ ID NO: 8541 - DNA, 23 bp, Artificial Sequence
  human ApoB siRNA sequence
cagtattctgaaaatccaatctc

SEQ ID NO: 8542 - DNA, 23 bp, Artificial Sequence
  human ApoB siRNA sequence
agtattctgaaaatccaatctcc

SEQ ID NO: 8543 - DNA, 23 bp, Artificial Sequence
  human ApoB siRNA sequence
gtattctgaaaatccaatctcct

SEQ ID NO: 8544 - DNA, 23 bp, Artificial Sequence
  human ApoB siRNA sequence
tattctgaaaatccaatctcctc

SEQ ID NO: 8545 - DNA, 23 bp, Artificial Sequence
  human ApoB siRNA sequence
attctgaaaatccaatctcctct

SEQ ID NO: 8546 - DNA, 23 bp, Artificial Sequence
  human ApoB siRNA sequence
ttctgaaaatccaatctcctctt

SEQ ID NO: 8547 - DNA, 23 bp, Artificial Sequence
  human ApoB siRNA sequence
tctgaaaatccaatctcctcttt

SEQ ID NO: 8548 - DNA, 23 bp, Artificial Sequence
  human ApoB siRNA sequence
ctgaaaatccaatctcctctttt

SEQ ID NO: 8549 - DNA, 23 bp, Artificial Sequence
  human ApoB siRNA sequence
tgaaaatccaatctcctcttttc

SEQ ID NO: 8550 - DNA, 23 bp, Artificial Sequence
  human ApoB siRNA sequence
gaaaatccaatctcctcttttca

SEQ ID NO: 8551 - DNA, 23 bp, Artificial Sequence
  human ApoB siRNA sequence
aaaatccaatctcctcttttcac

SEQ ID NO: 8552 - DNA, 23 bp, Artificial Sequence
  human ApoB siRNA sequence
aaatccaatctcctcttttcaca

SEQ ID NO: 8553 - DNA, 23 bp, Artificial Sequence
  human ApoB siRNA sequence
aatccaatctcctcttttcacat

SEQ ID NO: 8554 - DNA, 23 bp, Artificial Sequence
  human ApoB siRNA sequence
atccaatctcctcttttcacatt

SEQ ID NO: 8555 - DNA, 23 bp, Artificial Sequence
  human ApoB siRNA sequence
tccaatctcctcttttcacatta

SEQ ID NO: 8556 - DNA, 23 bp, Artificial Sequence
  human ApoB siRNA sequence
ccaatctcctcttttcacattag

SEQ ID NO: 8557 - DNA, 23 bp, Artificial Sequence
  human ApoB siRNA sequence
caatctcctcttttcacattaga

SEQ ID NO: 8558 - DNA, 23 bp, Artificial Sequence
  human ApoB siRNA sequence
aatctcctcttttcacattagat

SEQ ID NO: 8559 - DNA, 23 bp, Artificial Sequence
  human ApoB siRNA sequence
atctcctcttttcacattagatg

SEQ ID NO: 8560 - DNA, 23 bp, Artificial Sequence
  human ApoB siRNA sequence
tctcctcttttcacattagatgc

SEQ ID NO: 8561 - DNA, 23 bp, Artificial Sequence
  human ApoB siRNA sequence
ctcctcttttcacattagatgca

SEQ ID NO: 8562 - DNA, 23 bp, Artificial Sequence
  human ApoB siRNA sequence
tcctcttttcacattagatgcaa

SEQ ID NO: 8563 - DNA, 23 bp, Artificial Sequence
  human ApoB siRNA sequence
cctcttttcacattagatgcaaa

SEQ ID NO: 8564 - DNA, 23 bp, Artificial Sequence
  human ApoB siRNA sequence
ctcttttcacattagatgcaaat

SEQ ID NO: 8565 - DNA, 23 bp, Artificial Sequence
  human ApoB siRNA sequence
tcttttcacattagatgcaaatg

SEQ ID NO: 8566 - DNA, 23 bp, Artificial Sequence
  human ApoB siRNA sequence
cttttcacattagatgcaaatgc

SEQ ID NO: 8567 - DNA, 23 bp, Artificial Sequence
  human ApoB siRNA sequence
ttttcacattagatgcaaatgct

SEQ ID NO: 8568 - DNA, 23 bp, Artificial Sequence
  human ApoB siRNA sequence
tttcacattagatgcaaatgctg

SEQ ID NO: 8569 - DNA, 23 bp, Artificial Sequence
  human ApoB siRNA sequence
ttcacattagatgcaaatgctga

SEQ ID NO: 8570 - DNA, 23 bp, Artificial Sequence
  human ApoB siRNA sequence
tcacattagatgcaaatgctgac

SEQ ID NO: 8571 - DNA, 23 bp, Artificial Sequence
  human ApoB siRNA sequence
cacattagatgcaaatgctgaca

SEQ ID NO: 8572 - DNA, 23 bp, Artificial Sequence
  human ApoB siRNA sequence
acattagatgcaaatgctgacat

SEQ ID NO: 8573 - DNA, 23 bp, Artificial Sequence
  human ApoB siRNA sequence
cattagatgcaaatgctgacata

SEQ ID NO: 8574 - DNA, 23 bp, Artificial Sequence
  human ApoB siRNA sequence
attagatgcaaatgctgacatag

SEQ ID NO: 8575 - DNA, 23 bp, Artificial Sequence
  human ApoB siRNA sequence
ttagatgcaaatgctgacatagg

SEQ ID NO: 8576 - DNA, 23 bp, Artificial Sequence
  human ApoB siRNA sequence
tagatgcaaatgctgacataggg

SEQ ID NO: 8577 - DNA, 23 bp, Artificial Sequence
  human ApoB siRNA sequence
agatgcaaatgctgacataggga

SEQ ID NO: 8578 - DNA, 23 bp, Artificial Sequence
  human ApoB siRNA sequence
gatgcaaatgctgacatagggaa

SEQ ID NO: 8579 - DNA, 23 bp, Artificial Sequence
  human ApoB siRNA sequence
atgcaaatgctgacatagggaat

SEQ ID NO: 8580 - DNA, 23 bp, Artificial Sequence
  human ApoB siRNA sequence
tgcaaatgctgacatagggaatg

SEQ ID NO: 8581 - DNA, 23 bp, Artificial Sequence
  human ApoB siRNA sequence
gcaaatgctgacatagggaatgg

SEQ ID NO: 8582 - DNA, 23 bp, Artificial Sequence
  human ApoB siRNA sequence
caaatgctgacatagggaatgga

SEQ ID NO: 8583 - DNA, 23 bp, Artificial Sequence
  human ApoB siRNA sequence
aaatgctgacatagggaatggaa

SEQ ID NO: 8584 - DNA, 23 bp, Artificial Sequence
  human ApoB siRNA sequence
aatgctgacatagggaatggaac

SEQ ID NO: 8585 - DNA, 23 bp, Artificial Sequence
  human ApoB siRNA sequence
atgctgacatagggaatggaacc

SEQ ID NO: 8586 - DNA, 23 bp, Artificial Sequence
  human ApoB siRNA sequence
tgctgacatagggaatggaacca

SEQ ID NO: 8587 - DNA, 23 bp, Artificial Sequence
  human ApoB siRNA sequence
gctgacatagggaatggaaccac

SEQ ID NO: 8588 - DNA, 23 bp, Artificial Sequence
  human ApoB siRNA sequence
ctgacatagggaatggaaccacc

SEQ ID NO: 8589 - DNA, 23 bp, Artificial Sequence
  human ApoB siRNA sequence
tgacatagggaatggaaccacct

SEQ ID NO: 8590 - DNA, 23 bp, Artificial Sequence
  human ApoB siRNA sequence
gacatagggaatggaaccacctc

SEQ ID NO: 8591 - DNA, 23 bp, Artificial Sequence
  human ApoB siRNA sequence
acatagggaatggaaccacctca

SEQ ID NO: 8592 - DNA, 23 bp, Artificial Sequence
  human ApoB siRNA sequence
catagggaatggaaccacctcag

SEQ ID NO: 8593 - DNA, 23 bp, Artificial Sequence
  human ApoB siRNA sequence
atagggaatggaaccacctcagc

SEQ ID NO: 8594 - DNA, 23 bp, Artificial Sequence
  human ApoB siRNA sequence
tagggaatggaaccacctcagca

SEQ ID NO: 8595 - DNA, 23 bp, Artificial Sequence
  human ApoB siRNA sequence
agggaatggaaccacctcagcaa

SEQ ID NO: 8596 - DNA, 23 bp, Artificial Sequence
  human ApoB siRNA sequence
gggaatggaaccacctcagcaaa

SEQ ID NO: 8597 - DNA, 23 bp, Artificial Sequence
  human ApoB siRNA sequence
ggaatggaaccacctcagcaaac

SEQ ID NO: 8598 - DNA, 23 bp, Artificial Sequence
  human ApoB siRNA sequence
gaatggaaccacctcagcaaacg

SEQ ID NO: 8599 - DNA, 23 bp, Artificial Sequence
  human ApoB siRNA sequence
aatggaaccacctcagcaaacga

SEQ ID NO: 8600 - DNA, 23 bp, Artificial Sequence
  human ApoB siRNA sequence
atggaaccacctcagcaaacgaa

SEQ ID NO: 8601 - DNA, 23 bp, Artificial Sequence
  human ApoB siRNA sequence
tggaaccacctcagcaaacgaag

SEQ ID NO: 8602 - DNA, 23 bp, Artificial Sequence
  human ApoB siRNA sequence
ggaaccacctcagcaaacgaagc

SEQ ID NO: 8603 - DNA, 23 bp, Artificial Sequence
  human ApoB siRNA sequence
gaaccacctcagcaaacgaagca

SEQ ID NO: 8604 - DNA, 23 bp, Artificial Sequence
  human ApoB siRNA sequence
aaccacctcagcaaacgaagcag

SEQ ID NO: 8605 - DNA, 23 bp, Artificial Sequence
  human ApoB siRNA sequence
accacctcagcaaacgaagcagg

SEQ ID NO: 8606 - DNA, 23 bp, Artificial Sequence
  human ApoB siRNA sequence
ccacctcagcaaacgaagcaggt

SEQ ID NO: 8607 - DNA, 23 bp, Artificial Sequence
  human ApoB siRNA sequence
cacctcagcaaacgaagcaggta

SEQ ID NO: 8608 - DNA, 23 bp, Artificial Sequence
  human ApoB siRNA sequence
acctcagcaaacgaagcaggtat

SEQ ID NO: 8609 - DNA, 23 bp, Artificial Sequence
  human ApoB siRNA sequence
cctcagcaaacgaagcaggtatc

SEQ ID NO: 8610 - DNA, 23 bp, Artificial Sequence
  human ApoB siRNA sequence
ctcagcaaacgaagcaggtatcg

SEQ ID NO: 8611 - DNA, 23 bp, Artificial Sequence
  human ApoB siRNA sequence
tcagcaaacgaagcaggtatcgc

SEQ ID NO: 8612 - DNA, 23 bp, Artificial Sequence
  human ApoB siRNA sequence
cagcaaacgaagcaggtatcgca

SEQ ID NO: 8613 - DNA, 23 bp, Artificial Sequence
  human ApoB siRNA sequence
agcaaacgaagcaggtatcgcag

SEQ ID NO: 8614 - DNA, 23 bp, Artificial Sequence
  human ApoB siRNA sequence
gcaaacgaagcaggtatcgcagc

SEQ ID NO: 8615 - DNA, 23 bp, Artificial Sequence
  human ApoB siRNA sequence
caaacgaagcaggtatcgcagct

SEQ ID NO: 8616 - DNA, 23 bp, Artificial Sequence
  human ApoB siRNA sequence
aaacgaagcaggtatcgcagctt

SEQ ID NO: 8617 - DNA, 23 bp, Artificial Sequence
  human ApoB siRNA sequence
aacgaagcaggtatcgcagcttc

SEQ ID NO: 8618 - DNA, 23 bp, Artificial Sequence
  human ApoB siRNA sequence
acgaagcaggtatcgcagcttcc

SEQ ID NO: 8619 - DNA, 23 bp, Artificial Sequence
  human ApoB siRNA sequence
cgaagcaggtatcgcagcttcca

SEQ ID NO: 8620 - DNA, 23 bp, Artificial Sequence
  human ApoB siRNA sequence
gaagcaggtatcgcagcttccat

SEQ ID NO: 8621 - DNA, 23 bp, Artificial Sequence
  human ApoB siRNA sequence
aagcaggtatcgcagcttccatc

SEQ ID NO: 8622 - DNA, 23 bp, Artificial Sequence
  human ApoB siRNA sequence
agcaggtatcgcagcttccatca

SEQ ID NO: 8623 - DNA, 23 bp, Artificial Sequence
  human ApoB siRNA sequence
gcaggtatcgcagcttccatcac

SEQ ID NO: 8624 - DNA, 23 bp, Artificial Sequence
  human ApoB siRNA sequence
caggtatcgcagcttccatcact

SEQ ID NO: 8625 - DNA, 23 bp, Artificial Sequence
  human ApoB siRNA sequence
aggtatcgcagcttccatcactg

SEQ ID NO: 8626 - DNA, 23 bp, Artificial Sequence
  human ApoB siRNA sequence
ggtatcgcagcttccatcactgc

SEQ ID NO: 8627 - DNA, 23 bp, Artificial Sequence
  human ApoB siRNA sequence
gtatcgcagcttccatcactgcc

SEQ ID NO: 8628 - DNA, 23 bp, Artificial Sequence
  human ApoB siRNA sequence
tatcgcagcttccatcactgcca

SEQ ID NO: 8629 - DNA, 23 bp, Artificial Sequence
  human ApoB siRNA sequence
atcgcagcttccatcactgccaa

SEQ ID NO: 8630 - DNA, 23 bp, Artificial Sequence
  human ApoB siRNA sequence
tcgcagcttccatcactgccaaa

SEQ ID NO: 8631 - DNA, 23 bp, Artificial Sequence
  human ApoB siRNA sequence
cgcagcttccatcactgccaaag

SEQ ID NO: 8632 - DNA, 23 bp, Artificial Sequence
  human ApoB siRNA sequence
gcagcttccatcactgccaaagg

SEQ ID NO: 8633 - DNA, 23 bp, Artificial Sequence
  human ApoB siRNA sequence
cagcttccatcactgccaaagga

SEQ ID NO: 8634 - DNA, 23 bp, Artificial Sequence
  human ApoB siRNA sequence
agcttccatcactgccaaaggag

SEQ ID NO: 8635 - DNA, 23 bp, Artificial Sequence
  human ApoB siRNA sequence
gcttccatcactgccaaaggaga

SEQ ID NO: 8636 - DNA, 23 bp, Artificial Sequence
  human ApoB siRNA sequence
cttccatcactgccaaaggagag

SEQ ID NO: 8637 - DNA, 23 bp, Artificial Sequence
  human ApoB siRNA sequence
ttccatcactgccaaaggagagt

SEQ ID NO: 8638 - DNA, 23 bp, Artificial Sequence
  human ApoB siRNA sequence
tccatcactgccaaaggagagtc

SEQ ID NO: 8639 - DNA, 23 bp, Artificial Sequence
  human ApoB siRNA sequence
ccatcactgccaaaggagagtcc

SEQ ID NO: 8640 - DNA, 23 bp, Artificial Sequence
  human ApoB siRNA sequence
catcactgccaaaggagagtcca

SEQ ID NO: 8641 - DNA, 23 bp, Artificial Sequence
  human ApoB siRNA sequence
atcactgccaaaggagagtccaa

SEQ ID NO: 8642 - DNA, 23 bp, Artificial Sequence
  human ApoB siRNA sequence
tcactgccaaaggagagtccaaa

SEQ ID NO: 8643 - DNA, 23 bp, Artificial Sequence
  human ApoB siRNA sequence
cactgccaaaggagagtccaaat

SEQ ID NO: 8644 - DNA, 23 bp, Artificial Sequence
  human ApoB siRNA sequence
actgccaaaggagagtccaaatt

SEQ ID NO: 8645 - DNA, 23 bp, Artificial Sequence
  human ApoB siRNA sequence
ctgccaaaggagagtccaaatta

SEQ ID NO: 8646 - DNA, 23 bp, Artificial Sequence
  human ApoB siRNA sequence
tgccaaaggagagtccaaattag

SEQ ID NO: 8647 - DNA, 23 bp, Artificial Sequence
  human ApoB siRNA sequence
gccaaaggagagtccaaattaga

SEQ ID NO: 8648 - DNA, 23 bp, Artificial Sequence
  human ApoB siRNA sequence
ccaaaggagagtccaaattagaa

SEQ ID NO: 8649 - DNA, 23 bp, Artificial Sequence
  human ApoB siRNA sequence
caaaggagagtccaaattagaag

SEQ ID NO: 8650 - DNA, 23 bp, Artificial Sequence
  human ApoB siRNA sequence
aaaggagagtccaaattagaagt

SEQ ID NO: 8651 - DNA, 23 bp, Artificial Sequence
  human ApoB siRNA sequence
aaggagagtccaaattagaagtt

SEQ ID NO: 8652 - DNA, 23 bp, Artificial Sequence
  human ApoB siRNA sequence
aggagagtccaaattagaagttc

SEQ ID NO: 8653 - DNA, 23 bp, Artificial Sequence
  human ApoB siRNA sequence
ggagagtccaaattagaagttct

SEQ ID NO: 8654 - DNA, 23 bp, Artificial Sequence
  human ApoB siRNA sequence
gagagtccaaattagaagttctc

SEQ ID NO: 8655 - DNA, 23 bp, Artificial Sequence
  human ApoB siRNA sequence
agagtccaaattagaagttctca

SEQ ID NO: 8656 - DNA, 23 bp, Artificial Sequence
  human ApoB siRNA sequence
gagtccaaattagaagttctcaa

SEQ ID NO: 8657 - DNA, 23 bp, Artificial Sequence
  human ApoB siRNA sequence
agtccaaattagaagttctcaat

SEQ ID NO: 8658 - DNA, 23 bp, Artificial Sequence
  human ApoB siRNA sequence
gtccaaattagaagttctcaatt

SEQ ID NO: 8659 - DNA, 23 bp, Artificial Sequence
  human ApoB siRNA sequence
tccaaattagaagttctcaattt

SEQ ID NO: 8660 - DNA, 23 bp, Artificial Sequence
  human ApoB siRNA sequence
ccaaattagaagttctcaatttt

SEQ ID NO: 8661 - DNA, 23 bp, Artificial Sequence
  human ApoB siRNA sequence
caaattagaagttctcaattttg

SEQ ID NO: 8662 - DNA, 23 bp, Artificial Sequence
  human ApoB siRNA sequence
aaattagaagttctcaattttga

SEQ ID NO: 8663 - DNA, 23 bp, Artificial Sequence
  human ApoB siRNA sequence
aattagaagttctcaattttgat

SEQ ID NO: 8664 - DNA, 23 bp, Artificial Sequence
  human ApoB siRNA sequence
attagaagttctcaattttgatt

SEQ ID NO: 8665 - DNA, 23 bp, Artificial Sequence
  human ApoB siRNA sequence
ttagaagttctcaattttgattt

SEQ ID NO: 8666 - DNA, 23 bp, Artificial Sequence
  human ApoB siRNA sequence
tagaagttctcaattttgatttt

SEQ ID NO: 8667 - DNA, 23 bp, Artificial Sequence
  human ApoB siRNA sequence
agaagttctcaattttgattttc

SEQ ID NO: 8668 - DNA, 23 bp, Artificial Sequence
  human ApoB siRNA sequence
gaagttctcaattttgattttca

SEQ ID NO: 8669 - DNA, 23 bp, Artificial Sequence
  human ApoB siRNA sequence
aagttctcaattttgattttcaa

SEQ ID NO: 8670 - DNA, 23 bp, Artificial Sequence
  human ApoB siRNA sequence
agttctcaattttgattttcaag

SEQ ID NO: 8671 - DNA, 23 bp, Artificial Sequence
  human ApoB siRNA sequence
gttctcaattttgattttcaagc

SEQ ID NO: 8672 - DNA, 23 bp, Artificial Sequence
  human ApoB siRNA sequence
ttctcaattttgattttcaagca

SEQ ID NO: 8673 - DNA, 23 bp, Artificial Sequence
  human ApoB siRNA sequence
tctcaattttgattttcaagcaa

SEQ ID NO: 8674 - DNA, 23 bp, Artificial Sequence
  human ApoB siRNA sequence
ctcaattttgattttcaagcaaa

SEQ ID NO: 8675 - DNA, 23 bp, Artificial Sequence
  human ApoB siRNA sequence
tcaattttgattttcaagcaaat

SEQ ID NO: 8676 - DNA, 23 bp, Artificial Sequence
  human ApoB siRNA sequence
caattttgattttcaagcaaatg

SEQ ID NO: 8677 - DNA, 23 bp, Artificial Sequence
  human ApoB siRNA sequence
aattttgattttcaagcaaatgc

SEQ ID NO: 8678 - DNA, 23 bp, Artificial Sequence
  human ApoB siRNA sequence
attttgattttcaagcaaatgca

SEQ ID NO: 8679 - DNA, 23 bp, Artificial Sequence
  human ApoB siRNA sequence
ttttgattttcaagcaaatgcac

SEQ ID NO: 8680 - DNA, 23 bp, Artificial Sequence
  human ApoB siRNA sequence
tttgattttcaagcaaatgcaca

SEQ ID NO: 8681 - DNA, 23 bp, Artificial Sequence
  human ApoB siRNA sequence
ttgattttcaagcaaatgcacaa

SEQ ID NO: 8682 - DNA, 23 bp, Artificial Sequence
  human ApoB siRNA sequence
tgattttcaagcaaatgcacaac

SEQ ID NO: 8683 - DNA, 23 bp, Artificial Sequence
  human ApoB siRNA sequence
gattttcaagcaaatgcacaact

SEQ ID NO: 8684 - DNA, 23 bp, Artificial Sequence
  human ApoB siRNA sequence
attttcaagcaaatgcacaactc

SEQ ID NO: 8685 - DNA, 23 bp, Artificial Sequence
  human ApoB siRNA sequence
ttttcaagcaaatgcacaactct

SEQ ID NO: 8686 - DNA, 23 bp, Artificial Sequence
  human ApoB siRNA sequence
tttcaagcaaatgcacaactctc

SEQ ID NO: 8687 - DNA, 23 bp, Artificial Sequence
  human ApoB siRNA sequence
ttcaagcaaatgcacaactctca

SEQ ID NO: 8688 - DNA, 23 bp, Artificial Sequence
  human ApoB siRNA sequence
tcaagcaaatgcacaactctcaa

SEQ ID NO: 8689 - DNA, 23 bp, Artificial Sequence
  human ApoB siRNA sequence
caagcaaatgcacaactctcaaa

SEQ ID NO: 8690 - DNA, 23 bp, Artificial Sequence
  human ApoB siRNA sequence
aagcaaatgcacaactctcaaac

SEQ ID NO: 8691 - DNA, 23 bp, Artificial Sequence
  human ApoB siRNA sequence
agcaaatgcacaactctcaaacc

SEQ ID NO: 8692 - DNA, 23 bp, Artificial Sequence
  human ApoB siRNA sequence
gcaaatgcacaactctcaaaccc

SEQ ID NO: 8693 - DNA, 23 bp, Artificial Sequence
  human ApoB siRNA sequence
caaatgcacaactctcaaaccct

SEQ ID NO: 8694 - DNA, 23 bp, Artificial Sequence
  human ApoB siRNA sequence
aaatgcacaactctcaaacccta

SEQ ID NO: 8695 - DNA, 23 bp, Artificial Sequence
  human ApoB siRNA sequence
aatgcacaactctcaaaccctaa

SEQ ID NO: 8696 - DNA, 23 bp, Artificial Sequence
  human ApoB siRNA sequence
atgcacaactctcaaaccctaag

SEQ ID NO: 8697 - DNA, 23 bp, Artificial Sequence
  human ApoB siRNA sequence
tgcacaactctcaaaccctaaga

SEQ ID NO: 8698 - DNA, 23 bp, Artificial Sequence
  human ApoB siRNA sequence
gcacaactctcaaaccctaagat

SEQ ID NO: 8699 - DNA, 23 bp, Artificial Sequence
  human ApoB siRNA sequence
cacaactctcaaaccctaagatt

SEQ ID NO: 8700 - DNA, 23 bp, Artificial Sequence
  human ApoB siRNA sequence
acaactctcaaaccctaagatta

SEQ ID NO: 8701 - DNA, 23 bp, Artificial Sequence
  human ApoB siRNA sequence
caactctcaaaccctaagattaa

SEQ ID NO: 8702 - DNA, 23 bp, Artificial Sequence
  human ApoB siRNA sequence
aactctcaaaccctaagattaat

SEQ ID NO: 8703 - DNA, 23 bp, Artificial Sequence
  human ApoB siRNA sequence
actctcaaaccctaagattaatc

SEQ ID NO: 8704 - DNA, 23 bp, Artificial Sequence
  human ApoB siRNA sequence
ctctcaaaccctaagattaatcc

SEQ ID NO: 8705 - DNA, 23 bp, Artificial Sequence
  human ApoB siRNA sequence
tctcaaaccctaagattaatccg

SEQ ID NO: 8706 - DNA, 23 bp, Artificial Sequence
  human ApoB siRNA sequence
ctcaaaccctaagattaatccgc

SEQ ID NO: 8707 - DNA, 23 bp, Artificial Sequence
  human ApoB siRNA sequence
tcaaaccctaagattaatccgct

SEQ ID NO: 8708 - DNA, 23 bp, Artificial Sequence
  human ApoB siRNA sequence
caaaccctaagattaatccgctg

SEQ ID NO: 8709 - DNA, 23 bp, Artificial Sequence
  human ApoB siRNA sequence
aaaccctaagattaatccgctgg

SEQ ID NO: 8710 - DNA, 23 bp, Artificial Sequence
  human ApoB siRNA sequence
aaccctaagattaatccgctggc

SEQ ID NO: 8711 - DNA, 23 bp, Artificial Sequence
  human ApoB siRNA sequence
accctaagattaatccgctggct

SEQ ID NO: 8712 - DNA, 23 bp, Artificial Sequence
  human ApoB siRNA sequence
ccctaagattaatccgctggctc

SEQ ID NO: 8713 - DNA, 23 bp, Artificial Sequence
  human ApoB siRNA sequence
cctaagattaatccgctggctct

SEQ ID NO: 8714 - DNA, 23 bp, Artificial Sequence
  human ApoB siRNA sequence
ctaagattaatccgctggctctg

SEQ ID NO: 8715 - DNA, 23 bp, Artificial Sequence
  human ApoB siRNA sequence
taagattaatccgctggctctga

SEQ ID NO: 8716 - DNA, 23 bp, Artificial Sequence
  human ApoB siRNA sequence
aagattaatccgctggctctgaa

SEQ ID NO: 8717 - DNA, 23 bp, Artificial Sequence
  human ApoB siRNA sequence
agattaatccgctggctctgaag

SEQ ID NO: 8718 - DNA, 23 bp, Artificial Sequence
  human ApoB siRNA sequence
gattaatccgctggctctgaagg

SEQ ID NO: 8719 - DNA, 23 bp, Artificial Sequence
  human ApoB siRNA sequence
attaatccgctggctctgaagga

SEQ ID NO: 8720 - DNA, 23 bp, Artificial Sequence
  human ApoB siRNA sequence
ttaatccgctggctctgaaggag

SEQ ID NO: 8721 - DNA, 23 bp, Artificial Sequence
  human ApoB siRNA sequence
taatccgctggctctgaaggagt

SEQ ID NO: 8722 - DNA, 23 bp, Artificial Sequence
  human ApoB siRNA sequence
aatccgctggctctgaaggagtc

SEQ ID NO: 8723 - DNA, 23 bp, Artificial Sequence
  human ApoB siRNA sequence
atccgctggctctgaaggagtca

SEQ ID NO: 8724 - DNA, 23 bp, Artificial Sequence
  human ApoB siRNA sequence
tccgctggctctgaaggagtcag

SEQ ID NO: 8725 - DNA, 23 bp, Artificial Sequence
  human ApoB siRNA sequence
ccgctggctctgaaggagtcagt

SEQ ID NO: 8726 - DNA, 23 bp, Artificial Sequence
  human ApoB siRNA sequence
cgctggctctgaaggagtcagtg

SEQ ID NO: 8727 - DNA, 23 bp, Artificial Sequence
  human ApoB siRNA sequence
gctggctctgaaggagtcagtga

SEQ ID NO: 8728 - DNA, 23 bp, Artificial Sequence
  human ApoB siRNA sequence
ctggctctgaaggagtcagtgaa

SEQ ID NO: 8729 - DNA, 23 bp, Artificial Sequence
  human ApoB siRNA sequence
tggctctgaaggagtcagtgaag

SEQ ID NO: 8730 - DNA, 23 bp, Artificial Sequence
  human ApoB siRNA sequence
ggctctgaaggagtcagtgaagt

SEQ ID NO: 8731 - DNA, 23 bp, Artificial Sequence
  human ApoB siRNA sequence
gctctgaaggagtcagtgaagtt

SEQ ID NO: 8732 - DNA, 23 bp, Artificial Sequence
  human ApoB siRNA sequence
ctctgaaggagtcagtgaagttc

SEQ ID NO: 8733 - DNA, 23 bp, Artificial Sequence
  human ApoB siRNA sequence
tctgaaggagtcagtgaagttct

SEQ ID NO: 8734 - DNA, 23 bp, Artificial Sequence
  human ApoB siRNA sequence
ctgaaggagtcagtgaagttctc

SEQ ID NO: 8735 - DNA, 23 bp, Artificial Sequence
  human ApoB siRNA sequence
tgaaggagtcagtgaagttctcc

SEQ ID NO: 8736 - DNA, 23 bp, Artificial Sequence
  human ApoB siRNA sequence
gaaggagtcagtgaagttctcca

SEQ ID NO: 8737 - DNA, 23 bp, Artificial Sequence
  human ApoB siRNA sequence
aaggagtcagtgaagttctccag

SEQ ID NO: 8738 - DNA, 23 bp, Artificial Sequence
  human ApoB siRNA sequence
aggagtcagtgaagttctccagc

SEQ ID NO: 8739 - DNA, 23 bp, Artificial Sequence
  human ApoB siRNA sequence
ggagtcagtgaagttctccagca

SEQ ID NO: 8740 - DNA, 23 bp, Artificial Sequence
  human ApoB siRNA sequence
gagtcagtgaagttctccagcaa

SEQ ID NO: 8741 - DNA, 23 bp, Artificial Sequence
  human ApoB siRNA sequence
agtcagtgaagttctccagcaag

SEQ ID NO: 8742 - DNA, 23 bp, Artificial Sequence
  human ApoB siRNA sequence
gtcagtgaagttctccagcaagt

SEQ ID NO: 8743 - DNA, 23 bp, Artificial Sequence
  human ApoB siRNA sequence
tcagtgaagttctccagcaagta

SEQ ID NO: 8744 - DNA, 23 bp, Artificial Sequence
  human ApoB siRNA sequence
cagtgaagttctccagcaagtac

SEQ ID NO: 8745 - DNA, 23 bp, Artificial Sequence
  human ApoB siRNA sequence
agtgaagttctccagcaagtacc

SEQ ID NO: 8746 - DNA, 23 bp, Artificial Sequence
  human ApoB siRNA sequence
gtgaagttctccagcaagtacct

SEQ ID NO: 8747 - DNA, 23 bp, Artificial Sequence
  human ApoB siRNA sequence
tgaagttctccagcaagtacctg

SEQ ID NO: 8748 - DNA, 23 bp, Artificial Sequence
  human ApoB siRNA sequence
gaagttctccagcaagtacctga

SEQ ID NO: 8749 - DNA, 23 bp, Artificial Sequence
  human ApoB siRNA sequence
aagttctccagcaagtacctgag

SEQ ID NO: 8750 - DNA, 23 bp, Artificial Sequence
  human ApoB siRNA sequence
agttctccagcaagtacctgaga

SEQ ID NO: 8751 - DNA, 23 bp, Artificial Sequence
  human ApoB siRNA sequence
gttctccagcaagtacctgagaa

SEQ ID NO: 8752 - DNA, 23 bp, Artificial Sequence
  human ApoB siRNA sequence
ttctccagcaagtacctgagaac

SEQ ID NO: 8753 - DNA, 23 bp, Artificial Sequence
  human ApoB siRNA sequence
tctccagcaagtacctgagaacg

SEQ ID NO: 8754 - DNA, 23 bp, Artificial Sequence
  human ApoB siRNA sequence
ctccagcaagtacctgagaacgg

SEQ ID NO: 8755 - DNA, 23 bp, Artificial Sequence
  human ApoB siRNA sequence
tccagcaagtacctgagaacgga

SEQ ID NO: 8756 - DNA, 23 bp, Artificial Sequence
  human ApoB siRNA sequence
ccagcaagtacctgagaacggag

SEQ ID NO: 8757 - DNA, 23 bp, Artificial Sequence
  human ApoB siRNA sequence
cagcaagtacctgagaacggagc

SEQ ID NO: 8758 - DNA, 23 bp, Artificial Sequence
  human ApoB siRNA sequence
agcaagtacctgagaacggagca

SEQ ID NO: 8759 - DNA, 23 bp, Artificial Sequence
  human ApoB siRNA sequence
gcaagtacctgagaacggagcat

SEQ ID NO: 8760 - DNA, 23 bp, Artificial Sequence
  human ApoB siRNA sequence
caagtacctgagaacggagcatg

SEQ ID NO: 8761 - DNA, 23 bp, Artificial Sequence
  human ApoB siRNA sequence
aagtacctgagaacggagcatgg

SEQ ID NO: 8762 - DNA, 23 bp, Artificial Sequence
  human ApoB siRNA sequence
agtacctgagaacggagcatggg

SEQ ID NO: 8763 - DNA, 23 bp, Artificial Sequence
  human ApoB siRNA sequence
gtacctgagaacggagcatggga

SEQ ID NO: 8764 - DNA, 23 bp, Artificial Sequence
  human ApoB siRNA sequence
tacctgagaacggagcatgggag

SEQ ID NO: 8765 - DNA, 23 bp, Artificial Sequence
  human ApoB siRNA sequence
acctgagaacggagcatgggagt

SEQ ID NO: 8766 - DNA, 23 bp, Artificial Sequence
  human ApoB siRNA sequence
cctgagaacggagcatgggagtg

SEQ ID NO: 8767 - DNA, 23 bp, Artificial Sequence
  human ApoB siRNA sequence
ctgagaacggagcatgggagtga

SEQ ID NO: 8768 - DNA, 23 bp, Artificial Sequence
  human ApoB siRNA sequence
tgagaacggagcatgggagtgaa

SEQ ID NO: 8769 - DNA, 23 bp, Artificial Sequence
  human ApoB siRNA sequence
gagaacggagcatgggagtgaaa

SEQ ID NO: 8770 - DNA, 23 bp, Artificial Sequence
  human ApoB siRNA sequence
agaacggagcatgggagtgaaat

SEQ ID NO: 8771 - DNA, 23 bp, Artificial Sequence
  human ApoB siRNA sequence
gaacggagcatgggagtgaaatg

SEQ ID NO: 8772 - DNA, 23 bp, Artificial Sequence
  human ApoB siRNA sequence
aacggagcatgggagtgaaatgc

SEQ ID NO: 8773 - DNA, 23 bp, Artificial Sequence
  human ApoB siRNA sequence
acggagcatgggagtgaaatgct

SEQ ID NO: 8774 - DNA, 23 bp, Artificial Sequence
  human ApoB siRNA sequence
cggagcatgggagtgaaatgctg

SEQ ID NO: 8775 - DNA, 23 bp, Artificial Sequence
  human ApoB siRNA sequence
ggagcatgggagtgaaatgctgt

SEQ ID NO: 8776 - DNA, 23 bp, Artificial Sequence
  human ApoB siRNA sequence
gagcatgggagtgaaatgctgtt

SEQ ID NO: 8777 - DNA, 23 bp, Artificial Sequence
  human ApoB siRNA sequence
agcatgggagtgaaatgctgttt

SEQ ID NO: 8778 - DNA, 23 bp, Artificial Sequence
  human ApoB siRNA sequence
gcatgggagtgaaatgctgtttt

SEQ ID NO: 8779 - DNA, 23 bp, Artificial Sequence
  human ApoB siRNA sequence
catgggagtgaaatgctgttttt

SEQ ID NO: 8780 - DNA, 23 bp, Artificial Sequence
  human ApoB siRNA sequence
atgggagtgaaatgctgtttttt

SEQ ID NO: 8781 - DNA, 23 bp, Artificial Sequence
  human ApoB siRNA sequence
tgggagtgaaatgctgttttttg

SEQ ID NO: 8782 - DNA, 23 bp, Artificial Sequence
  human ApoB siRNA sequence
gggagtgaaatgctgttttttgg

SEQ ID NO: 8783 - DNA, 23 bp, Artificial Sequence
  human ApoB siRNA sequence
ggagtgaaatgctgttttttgga

SEQ ID NO: 8784 - DNA, 23 bp, Artificial Sequence
  human ApoB siRNA sequence
gagtgaaatgctgttttttggaa

SEQ ID NO: 8785 - DNA, 23 bp, Artificial Sequence
  human ApoB siRNA sequence
agtgaaatgctgttttttggaaa

SEQ ID NO: 8786 - DNA, 23 bp, Artificial Sequence
  human ApoB siRNA sequence
gtgaaatgctgttttttggaaat

SEQ ID NO: 8787 - DNA, 23 bp, Artificial Sequence
  human ApoB siRNA sequence
tgaaatgctgttttttggaaatg

SEQ ID NO: 8788 - DNA, 23 bp, Artificial Sequence
  human ApoB siRNA sequence
gaaatgctgttttttggaaatgc

SEQ ID NO: 8789 - DNA, 23 bp, Artificial Sequence
  human ApoB siRNA sequence
aaatgctgttttttggaaatgct

SEQ ID NO: 8790 - DNA, 23 bp, Artificial Sequence
  human ApoB siRNA sequence
aatgctgttttttggaaatgcta

SEQ ID NO: 8791 - DNA, 23 bp, Artificial Sequence
  human ApoB siRNA sequence
atgctgttttttggaaatgctat

SEQ ID NO: 8792 - DNA, 23 bp, Artificial Sequence
  human ApoB siRNA sequence
tgctgttttttggaaatgctatt

SEQ ID NO: 8793 - DNA, 23 bp, Artificial Sequence
  human ApoB siRNA sequence
gctgttttttggaaatgctattg

SEQ ID NO: 8794 - DNA, 23 bp, Artificial Sequence
  human ApoB siRNA sequence
ctgttttttggaaatgctattga

SEQ ID NO: 8795 - DNA, 23 bp, Artificial Sequence
  human ApoB siRNA sequence
tgttttttggaaatgctattgag

SEQ ID NO: 8796 - DNA, 23 bp, Artificial Sequence
  human ApoB siRNA sequence
gttttttggaaatgctattgagg

SEQ ID NO: 8797 - DNA, 23 bp, Artificial Sequence
  human ApoB siRNA sequence
ttttttggaaatgctattgaggg

SEQ ID NO: 8798 - DNA, 23 bp, Artificial Sequence
  human ApoB siRNA sequence
tttttggaaatgctattgaggga

SEQ ID NO: 8799 - DNA, 23 bp, Artificial Sequence
  human ApoB siRNA sequence
ttttggaaatgctattgagggaa

SEQ ID NO: 8800 - DNA, 23 bp, Artificial Sequence
  human ApoB siRNA sequence
tttggaaatgctattgagggaaa

SEQ ID NO: 8801 - DNA, 23 bp, Artificial Sequence
  human ApoB siRNA sequence
ttggaaatgctattgagggaaaa

SEQ ID NO: 8802 - DNA, 23 bp, Artificial Sequence
  human ApoB siRNA sequence
tggaaatgctattgagggaaaat

SEQ ID NO: 8803 - DNA, 23 bp, Artificial Sequence
  human ApoB siRNA sequence
ggaaatgctattgagggaaaatc

SEQ ID NO: 8804 - DNA, 23 bp, Artificial Sequence
  human ApoB siRNA sequence
gaaatgctattgagggaaaatca

SEQ ID NO: 8805 - DNA, 23 bp, Artificial Sequence
  human ApoB siRNA sequence
aaatgctattgagggaaaatcaa

SEQ ID NO: 8806 - DNA, 23 bp, Artificial Sequence
  human ApoB siRNA sequence
aatgctattgagggaaaatcaaa

SEQ ID NO: 8807 - DNA, 23 bp, Artificial Sequence
  human ApoB siRNA sequence
atgctattgagggaaaatcaaac

SEQ ID NO: 8808 - DNA, 23 bp, Artificial Sequence
  human ApoB siRNA sequence
tgctattgagggaaaatcaaaca

SEQ ID NO: 8809 - DNA, 23 bp, Artificial Sequence
  human ApoB siRNA sequence
gctattgagggaaaatcaaacac

SEQ ID NO: 8810 - DNA, 23 bp, Artificial Sequence
  human ApoB siRNA sequence
ctattgagggaaaatcaaacaca

SEQ ID NO: 8811 - DNA, 23 bp, Artificial Sequence
  human ApoB siRNA sequence
tattgagggaaaatcaaacacag

SEQ ID NO: 8812 - DNA, 23 bp, Artificial Sequence
  human ApoB siRNA sequence
attgagggaaaatcaaacacagt

SEQ ID NO: 8813 - DNA, 23 bp, Artificial Sequence
  human ApoB siRNA sequence
ttgagggaaaatcaaacacagtg

SEQ ID NO: 8814 - DNA, 23 bp, Artificial Sequence
  human ApoB siRNA sequence
tgagggaaaatcaaacacagtgg

SEQ ID NO: 8815 - DNA, 23 bp, Artificial Sequence
  human ApoB siRNA sequence
gagggaaaatcaaacacagtggc

SEQ ID NO: 8816 - DNA, 23 bp, Artificial Sequence
  human ApoB siRNA sequence
agggaaaatcaaacacagtggca

SEQ ID NO: 8817 - DNA, 23 bp, Artificial Sequence
  human ApoB siRNA sequence
gggaaaatcaaacacagtggcaa

SEQ ID NO: 8818 - DNA, 23 bp, Artificial Sequence
  human ApoB siRNA sequence
ggaaaatcaaacacagtggcaag

SEQ ID NO: 8819 - DNA, 23 bp, Artificial Sequence
  human ApoB siRNA sequence
gaaaatcaaacacagtggcaagt

SEQ ID NO: 8820 - DNA, 23 bp, Artificial Sequence
  human ApoB siRNA sequence
aaaatcaaacacagtggcaagtt

SEQ ID NO: 8821 - DNA, 23 bp, Artificial Sequence
  human ApoB siRNA sequence
aaatcaaacacagtggcaagttt

SEQ ID NO: 8822 - DNA, 23 bp, Artificial Sequence
  human ApoB siRNA sequence
aatcaaacacagtggcaagttta

SEQ ID NO: 8823 - DNA, 23 bp, Artificial Sequence
  human ApoB siRNA sequence
atcaaacacagtggcaagtttac

SEQ ID NO: 8824 - DNA, 23 bp, Artificial Sequence
  human ApoB siRNA sequence
tcaaacacagtggcaagtttaca

SEQ ID NO: 8825 - DNA, 23 bp, Artificial Sequence
  human ApoB siRNA sequence
caaacacagtggcaagtttacac

SEQ ID NO: 8826 - DNA, 23 bp, Artificial Sequence
  human ApoB siRNA sequence
aaacacagtggcaagtttacaca

SEQ ID NO: 8827 - DNA, 23 bp, Artificial Sequence
  human ApoB siRNA sequence
aacacagtggcaagtttacacac

SEQ ID NO: 8828 - DNA, 23 bp, Artificial Sequence
  human ApoB siRNA sequence
acacagtggcaagtttacacaca

SEQ ID NO: 8829 - DNA, 23 bp, Artificial Sequence
  human ApoB siRNA sequence
cacagtggcaagtttacacacag

SEQ ID NO: 8830 - DNA, 23 bp, Artificial Sequence
  human ApoB siRNA sequence
acagtggcaagtttacacacaga

SEQ ID NO: 8831 - DNA, 23 bp, Artificial Sequence
  human ApoB siRNA sequence
cagtggcaagtttacacacagaa

SEQ ID NO: 8832 - DNA, 23 bp, Artificial Sequence
  human ApoB siRNA sequence
agtggcaagtttacacacagaaa

SEQ ID NO: 8833 - DNA, 23 bp, Artificial Sequence
  human ApoB siRNA sequence
gtggcaagtttacacacagaaaa

SEQ ID NO: 8834 - DNA, 23 bp, Artificial Sequence
  human ApoB siRNA sequence
tggcaagtttacacacagaaaaa

SEQ ID NO: 8835 - DNA, 23 bp, Artificial Sequence
  human ApoB siRNA sequence
ggcaagtttacacacagaaaaaa

SEQ ID NO: 8836 - DNA, 23 bp, Artificial Sequence
  human ApoB siRNA sequence
gcaagtttacacacagaaaaaaa

SEQ ID NO: 8837 - DNA, 23 bp, Artificial Sequence
  human ApoB siRNA sequence
caagtttacacacagaaaaaaat

SEQ ID NO: 8838 - DNA, 23 bp, Artificial Sequence
  human ApoB siRNA sequence
aagtttacacacagaaaaaaata

SEQ ID NO: 8839 - DNA, 23 bp, Artificial Sequence
  human ApoB siRNA sequence
agtttacacacagaaaaaaatac

SEQ ID NO: 8840 - DNA, 23 bp, Artificial Sequence
  human ApoB siRNA sequence
gtttacacacagaaaaaaataca

SEQ ID NO: 8841 - DNA, 23 bp, Artificial Sequence
  human ApoB siRNA sequence
tttacacacagaaaaaaatacac

SEQ ID NO: 8842 - DNA, 23 bp, Artificial Sequence
  human ApoB siRNA sequence
ttacacacagaaaaaaatacact

SEQ ID NO: 8843 - DNA, 23 bp, Artificial Sequence
  human ApoB siRNA sequence
tacacacagaaaaaaatacactg

SEQ ID NO: 8844 - DNA, 23 bp, Artificial Sequence
  human ApoB siRNA sequence
acacacagaaaaaaatacactgg

SEQ ID NO: 8845 - DNA, 23 bp, Artificial Sequence
  human ApoB siRNA sequence
cacacagaaaaaaatacactgga

SEQ ID NO: 8846 - DNA, 23 bp, Artificial Sequence
  human ApoB siRNA sequence
acacagaaaaaaatacactggag

SEQ ID NO: 8847 - DNA, 23 bp, Artificial Sequence
  human ApoB siRNA sequence
cacagaaaaaaatacactggagc

SEQ ID NO: 8848 - DNA, 23 bp, Artificial Sequence
  human ApoB siRNA sequence
acagaaaaaaatacactggagct

SEQ ID NO: 8849 - DNA, 23 bp, Artificial Sequence
  human ApoB siRNA sequence
cagaaaaaaatacactggagctt

SEQ ID NO: 8850 - DNA, 23 bp, Artificial Sequence
  human ApoB siRNA sequence
agaaaaaaatacactggagctta

SEQ ID NO: 8851 - DNA, 23 bp, Artificial Sequence
  human ApoB siRNA sequence
gaaaaaaatacactggagcttag

SEQ ID NO: 8852 - DNA, 23 bp, Artificial Sequence
  human ApoB siRNA sequence
aaaaaaatacactggagcttagt

SEQ ID NO: 8853 - DNA, 23 bp, Artificial Sequence
  human ApoB siRNA sequence
aaaaaatacactggagcttagta

SEQ ID NO: 8854 - DNA, 23 bp, Artificial Sequence
  human ApoB siRNA sequence
aaaaatacactggagcttagtaa

SEQ ID NO: 8855 - DNA, 23 bp, Artificial Sequence
  human ApoB siRNA sequence
aaaatacactggagcttagtaat

SEQ ID NO: 8856 - DNA, 23 bp, Artificial Sequence
  human ApoB siRNA sequence
aaatacactggagcttagtaatg

SEQ ID NO: 8857 - DNA, 23 bp, Artificial Sequence
  human ApoB siRNA sequence
aatacactggagcttagtaatgg

SEQ ID NO: 8858 - DNA, 23 bp, Artificial Sequence
  human ApoB siRNA sequence
atacactggagcttagtaatgga

SEQ ID NO: 8859 - DNA, 23 bp, Artificial Sequence
  human ApoB siRNA sequence
tacactggagcttagtaatggag

SEQ ID NO: 8860 - DNA, 23 bp, Artificial Sequence
  human ApoB siRNA sequence
acactggagcttagtaatggagt

SEQ ID NO: 8861 - DNA, 23 bp, Artificial Sequence
  human ApoB siRNA sequence
cactggagcttagtaatggagtg

SEQ ID NO: 8862 - DNA, 23 bp, Artificial Sequence
  human ApoB siRNA sequence
actggagcttagtaatggagtga

SEQ ID NO: 8863 - DNA, 23 bp, Artificial Sequence
  human ApoB siRNA sequence
ctggagcttagtaatggagtgat

SEQ ID NO: 8864 - DNA, 23 bp, Artificial Sequence
  human ApoB siRNA sequence
tggagcttagtaatggagtgatt

SEQ ID NO: 8865 - DNA, 23 bp, Artificial Sequence
  human ApoB siRNA sequence
ggagcttagtaatggagtgattg

SEQ ID NO: 8866 - DNA, 23 bp, Artificial Sequence
  human ApoB siRNA sequence
gagcttagtaatggagtgattgt

SEQ ID NO: 8867 - DNA, 23 bp, Artificial Sequence
  human ApoB siRNA sequence
agcttagtaatggagtgattgtc

SEQ ID NO: 8868 - DNA, 23 bp, Artificial Sequence
  human ApoB siRNA sequence
gcttagtaatggagtgattgtca

SEQ ID NO: 8869 - DNA, 23 bp, Artificial Sequence
  human ApoB siRNA sequence
cttagtaatggagtgattgtcaa

SEQ ID NO: 8870 - DNA, 23 bp, Artificial Sequence
  human ApoB siRNA sequence
ttagtaatggagtgattgtcaag

SEQ ID NO: 8871 - DNA, 23 bp, Artificial Sequence
  human ApoB siRNA sequence
tagtaatggagtgattgtcaaga

SEQ ID NO: 8872 - DNA, 23 bp, Artificial Sequence
  human ApoB siRNA sequence
agtaatggagtgattgtcaagat

SEQ ID NO: 8873 - DNA, 23 bp, Artificial Sequence
  human ApoB siRNA sequence
gtaatggagtgattgtcaagata

SEQ ID NO: 8874 - DNA, 23 bp, Artificial Sequence
  human ApoB siRNA sequence
taatggagtgattgtcaagataa

SEQ ID NO: 8875 - DNA, 23 bp, Artificial Sequence
  human ApoB siRNA sequence
aatggagtgattgtcaagataaa

SEQ ID NO: 8876 - DNA, 23 bp, Artificial Sequence
  human ApoB siRNA sequence
atggagtgattgtcaagataaac

SEQ ID NO: 8877 - DNA, 23 bp, Artificial Sequence
  human ApoB siRNA sequence
tggagtgattgtcaagataaaca

SEQ ID NO: 8878 - DNA, 23 bp, Artificial Sequence
  human ApoB siRNA sequence
ggagtgattgtcaagataaacaa

SEQ ID NO: 8879 - DNA, 23 bp, Artificial Sequence
  human ApoB siRNA sequence
gagtgattgtcaagataaacaat

SEQ ID NO: 8880 - DNA, 23 bp, Artificial Sequence
  human ApoB siRNA sequence
agtgattgtcaagataaacaatc

SEQ ID NO: 8881 - DNA, 23 bp, Artificial Sequence
  human ApoB siRNA sequence
gtgattgtcaagataaacaatca

SEQ ID NO: 8882 - DNA, 23 bp, Artificial Sequence
  human ApoB siRNA sequence
tgattgtcaagataaacaatcag

SEQ ID NO: 8883 - DNA, 23 bp, Artificial Sequence
  human ApoB siRNA sequence
gattgtcaagataaacaatcagc

SEQ ID NO: 8884 - DNA, 23 bp, Artificial Sequence
  human ApoB siRNA sequence
attgtcaagataaacaatcagct

SEQ ID NO: 8885 - DNA, 23 bp, Artificial Sequence
  human ApoB siRNA sequence
ttgtcaagataaacaatcagctt

SEQ ID NO: 8886 - DNA, 23 bp, Artificial Sequence
  human ApoB siRNA sequence
tgtcaagataaacaatcagctta

SEQ ID NO: 8887 - DNA, 23 bp, Artificial Sequence
  human ApoB siRNA sequence
gtcaagataaacaatcagcttac

SEQ ID NO: 8888 - DNA, 23 bp, Artificial Sequence
  human ApoB siRNA sequence
tcaagataaacaatcagcttacc

SEQ ID NO: 8889 - DNA, 23 bp, Artificial Sequence
  human ApoB siRNA sequence
caagataaacaatcagcttaccc

SEQ ID NO: 8890 - DNA, 23 bp, Artificial Sequence
  human ApoB siRNA sequence
aagataaacaatcagcttaccct

SEQ ID NO: 8891 - DNA, 23 bp, Artificial Sequence
  human ApoB siRNA sequence
agataaacaatcagcttaccctg

SEQ ID NO: 8892 - DNA, 23 bp, Artificial Sequence
  human ApoB siRNA sequence
gataaacaatcagcttaccctgg

SEQ ID NO: 8893 - DNA, 23 bp, Artificial Sequence
  human ApoB siRNA sequence
ataaacaatcagcttaccctgga

SEQ ID NO: 8894 - DNA, 23 bp, Artificial Sequence
  human ApoB siRNA sequence
taaacaatcagcttaccctggat

SEQ ID NO: 8895 - DNA, 23 bp, Artificial Sequence
  human ApoB siRNA sequence
aaacaatcagcttaccctggata

SEQ ID NO: 8896 - DNA, 23 bp, Artificial Sequence
  human ApoB siRNA sequence
aacaatcagcttaccctggatag

SEQ ID NO: 8897 - DNA, 23 bp, Artificial Sequence
  human ApoB siRNA sequence
acaatcagcttaccctggatagc

SEQ ID NO: 8898 - DNA, 23 bp, Artificial Sequence
  human ApoB siRNA sequence
caatcagcttaccctggatagca

SEQ ID NO: 8899 - DNA, 23 bp, Artificial Sequence
  human ApoB siRNA sequence
aatcagcttaccctggatagcaa

SEQ ID NO: 8900 - DNA, 23 bp, Artificial Sequence
  human ApoB siRNA sequence
atcagcttaccctggatagcaac

SEQ ID NO: 8901 - DNA, 23 bp, Artificial Sequence
  human ApoB siRNA sequence
tcagcttaccctggatagcaaca

SEQ ID NO: 8902 - DNA, 23 bp, Artificial Sequence
  human ApoB siRNA sequence
cagcttaccctggatagcaacac

SEQ ID NO: 8903 - DNA, 23 bp, Artificial Sequence
  human ApoB siRNA sequence
agcttaccctggatagcaacact

SEQ ID NO: 8904 - DNA, 23 bp, Artificial Sequence
  human ApoB siRNA sequence
gcttaccctggatagcaacacta

SEQ ID NO: 8905 - DNA, 23 bp, Artificial Sequence
  human ApoB siRNA sequence
cttaccctggatagcaacactaa

SEQ ID NO: 8906 - DNA, 23 bp, Artificial Sequence
  human ApoB siRNA sequence
ttaccctggatagcaacactaaa

SEQ ID NO: 8907 - DNA, 23 bp, Artificial Sequence
  human ApoB siRNA sequence
taccctggatagcaacactaaat

SEQ ID NO: 8908 - DNA, 23 bp, Artificial Sequence
  human ApoB siRNA sequence
accctggatagcaacactaaata

SEQ ID NO: 8909 - DNA, 23 bp, Artificial Sequence
  human ApoB siRNA sequence
ccctggatagcaacactaaatac

SEQ ID NO: 8910 - DNA, 23 bp, Artificial Sequence
  human ApoB siRNA sequence
cctggatagcaacactaaatact

SEQ ID NO: 8911 - DNA, 23 bp, Artificial Sequence
  human ApoB siRNA sequence
ctggatagcaacactaaatactt

SEQ ID NO: 8912 - DNA, 23 bp, Artificial Sequence
  human ApoB siRNA sequence
tggatagcaacactaaatacttc

SEQ ID NO: 8913 - DNA, 23 bp, Artificial Sequence
  human ApoB siRNA sequence
ggatagcaacactaaatacttcc

SEQ ID NO: 8914 - DNA, 23 bp, Artificial Sequence
  human ApoB siRNA sequence
gatagcaacactaaatacttcca

SEQ ID NO: 8915 - DNA, 23 bp, Artificial Sequence
  human ApoB siRNA sequence
atagcaacactaaatacttccac

SEQ ID NO: 8916 - DNA, 23 bp, Artificial Sequence
  human ApoB siRNA sequence
tagcaacactaaatacttccaca

SEQ ID NO: 8917 - DNA, 23 bp, Artificial Sequence
  human ApoB siRNA sequence
agcaacactaaatacttccacaa

SEQ ID NO: 8918 - DNA, 23 bp, Artificial Sequence
  human ApoB siRNA sequence
gcaacactaaatacttccacaaa

SEQ ID NO: 8919 - DNA, 23 bp, Artificial Sequence
  human ApoB siRNA sequence
caacactaaatacttccacaaat

SEQ ID NO: 8920 - DNA, 23 bp, Artificial Sequence
  human ApoB siRNA sequence
aacactaaatacttccacaaatt

SEQ ID NO: 8921 - DNA, 23 bp, Artificial Sequence
  human ApoB siRNA sequence
acactaaatacttccacaaattg

SEQ ID NO: 8922 - DNA, 23 bp, Artificial Sequence
  human ApoB siRNA sequence
cactaaatacttccacaaattga

SEQ ID NO: 8923 - DNA, 23 bp, Artificial Sequence
  human ApoB siRNA sequence
actaaatacttccacaaattgaa

SEQ ID NO: 8924 - DNA, 23 bp, Artificial Sequence
  human ApoB siRNA sequence
ctaaatacttccacaaattgaac

SEQ ID NO: 8925 - DNA, 23 bp, Artificial Sequence
  human ApoB siRNA sequence
taaatacttccacaaattgaaca

SEQ ID NO: 8926 - DNA, 23 bp, Artificial Sequence
  human ApoB siRNA sequence
aaatacttccacaaattgaacat

SEQ ID NO: 8927 - DNA, 23 bp, Artificial Sequence
  human ApoB siRNA sequence
aatacttccacaaattgaacatc

SEQ ID NO: 8928 - DNA, 23 bp, Artificial Sequence
  human ApoB siRNA sequence
atacttccacaaattgaacatcc

SEQ ID NO: 8929 - DNA, 23 bp, Artificial Sequence
  human ApoB siRNA sequence
tacttccacaaattgaacatccc

SEQ ID NO: 8930 - DNA, 23 bp, Artificial Sequence
  human ApoB siRNA sequence
acttccacaaattgaacatcccc

SEQ ID NO: 8931 - DNA, 23 bp, Artificial Sequence
  human ApoB siRNA sequence
cttccacaaattgaacatcccca

SEQ ID NO: 8932 - DNA, 23 bp, Artificial Sequence
  human ApoB siRNA sequence
ttccacaaattgaacatccccaa

SEQ ID NO: 8933 - DNA, 23 bp, Artificial Sequence
  human ApoB siRNA sequence
tccacaaattgaacatccccaaa

SEQ ID NO: 8934 - DNA, 23 bp, Artificial Sequence
  human ApoB siRNA sequence
ccacaaattgaacatccccaaac

SEQ ID NO: 8935 - DNA, 23 bp, Artificial Sequence
  human ApoB siRNA sequence
cacaaattgaacatccccaaact

SEQ ID NO: 8936 - DNA, 23 bp, Artificial Sequence
  human ApoB siRNA sequence
acaaattgaacatccccaaactg

SEQ ID NO: 8937 - DNA, 23 bp, Artificial Sequence
  human ApoB siRNA sequence
caaattgaacatccccaaactgg

SEQ ID NO: 8938 - DNA, 23 bp, Artificial Sequence
  human ApoB siRNA sequence
aaattgaacatccccaaactgga

SEQ ID NO: 8939 - DNA, 23 bp, Artificial Sequence
  human ApoB siRNA sequence
aattgaacatccccaaactggac

SEQ ID NO: 8940 - DNA, 23 bp, Artificial Sequence
  human ApoB siRNA sequence
attgaacatccccaaactggact

SEQ ID NO: 8941 - DNA, 23 bp, Artificial Sequence
  human ApoB siRNA sequence
ttgaacatccccaaactggactt

SEQ ID NO: 8942 - DNA, 23 bp, Artificial Sequence
  human ApoB siRNA sequence
tgaacatccccaaactggacttc

SEQ ID NO: 8943 - DNA, 23 bp, Artificial Sequence
  human ApoB siRNA sequence
gaacatccccaaactggacttct

SEQ ID NO: 8944 - DNA, 23 bp, Artificial Sequence
  human ApoB siRNA sequence
aacatccccaaactggacttctc

SEQ ID NO: 8945 - DNA, 23 bp, Artificial Sequence
  human ApoB siRNA sequence
acatccccaaactggacttctct

SEQ ID NO: 8946 - DNA, 23 bp, Artificial Sequence
  human ApoB siRNA sequence
catccccaaactggacttctcta

SEQ ID NO: 8947 - DNA, 23 bp, Artificial Sequence
  human ApoB siRNA sequence
atccccaaactggacttctctag

SEQ ID NO: 8948 - DNA, 23 bp, Artificial Sequence
  human ApoB siRNA sequence
tccccaaactggacttctctagt

SEQ ID NO: 8949 - DNA, 23 bp, Artificial Sequence
  human ApoB siRNA sequence
ccccaaactggacttctctagtc

SEQ ID NO: 8950 - DNA, 23 bp, Artificial Sequence
  human ApoB siRNA sequence
cccaaactggacttctctagtca

SEQ ID NO: 8951 - DNA, 23 bp, Artificial Sequence
  human ApoB siRNA sequence
ccaaactggacttctctagtcag

SEQ ID NO: 8952 - DNA, 23 bp, Artificial Sequence
  human ApoB siRNA sequence
caaactggacttctctagtcagg

SEQ ID NO: 8953 - DNA, 23 bp, Artificial Sequence
  human ApoB siRNA sequence
aaactggacttctctagtcaggc

SEQ ID NO: 8954 - DNA, 23 bp, Artificial Sequence
  human ApoB siRNA sequence
aactggacttctctagtcaggct

SEQ ID NO: 8955 - DNA, 23 bp, Artificial Sequence
  human ApoB siRNA sequence
actggacttctctagtcaggctg

SEQ ID NO: 8956 - DNA, 23 bp, Artificial Sequence
  human ApoB siRNA sequence
ctggacttctctagtcaggctga

SEQ ID NO: 8957 - DNA, 23 bp, Artificial Sequence
  human ApoB siRNA sequence
tggacttctctagtcaggctgac

SEQ ID NO: 8958 - DNA, 23 bp, Artificial Sequence
  human ApoB siRNA sequence
ggacttctctagtcaggctgacc

SEQ ID NO: 8959 - DNA, 23 bp, Artificial Sequence
  human ApoB siRNA sequence
gacttctctagtcaggctgacct

SEQ ID NO: 8960 - DNA, 23 bp, Artificial Sequence
  human ApoB siRNA sequence
acttctctagtcaggctgacctg

SEQ ID NO: 8961 - DNA, 23 bp, Artificial Sequence
  human ApoB siRNA sequence
cttctctagtcaggctgacctgc

SEQ ID NO: 8962 - DNA, 23 bp, Artificial Sequence
  human ApoB siRNA sequence
ttctctagtcaggctgacctgcg

SEQ ID NO: 8963 - DNA, 23 bp, Artificial Sequence
  human ApoB siRNA sequence
tctctagtcaggctgacctgcgc

SEQ ID NO: 8964 - DNA, 23 bp, Artificial Sequence
  human ApoB siRNA sequence
ctctagtcaggctgacctgcgca

SEQ ID NO: 8965 - DNA, 23 bp, Artificial Sequence
  human ApoB siRNA sequence
tctagtcaggctgacctgcgcaa

SEQ ID NO: 8966 - DNA, 23 bp, Artificial Sequence
  human ApoB siRNA sequence
ctagtcaggctgacctgcgcaac

SEQ ID NO: 8967 - DNA, 23 bp, Artificial Sequence
  human ApoB siRNA sequence
tagtcaggctgacctgcgcaacg

SEQ ID NO: 8968 - DNA, 23 bp, Artificial Sequence
  human ApoB siRNA sequence
agtcaggctgacctgcgcaacga

SEQ ID NO: 8969 - DNA, 23 bp, Artificial Sequence
  human ApoB siRNA sequence
gtcaggctgacctgcgcaacgag

SEQ ID NO: 8970 - DNA, 23 bp, Artificial Sequence
  human ApoB siRNA sequence
tcaggctgacctgcgcaacgaga

SEQ ID NO: 8971 - DNA, 23 bp, Artificial Sequence
  human ApoB siRNA sequence
caggctgacctgcgcaacgagat

SEQ ID NO: 8972 - DNA, 23 bp, Artificial Sequence
  human ApoB siRNA sequence
aggctgacctgcgcaacgagatc

SEQ ID NO: 8973 - DNA, 23 bp, Artificial Sequence
  human ApoB siRNA sequence
ggctgacctgcgcaacgagatca

SEQ ID NO: 8974 - DNA, 23 bp, Artificial Sequence
  human ApoB siRNA sequence
gctgacctgcgcaacgagatcaa

SEQ ID NO: 8975 - DNA, 23 bp, Artificial Sequence
  human ApoB siRNA sequence
ctgacctgcgcaacgagatcaag

SEQ ID NO: 8976 - DNA, 23 bp, Artificial Sequence
  human ApoB siRNA sequence
tgacctgcgcaacgagatcaaga

SEQ ID NO: 8977 - DNA, 23 bp, Artificial Sequence
  human ApoB siRNA sequence
gacctgcgcaacgagatcaagac

SEQ ID NO: 8978 - DNA, 23 bp, Artificial Sequence
  human ApoB siRNA sequence
acctgcgcaacgagatcaagaca

SEQ ID NO: 8979 - DNA, 23 bp, Artificial Sequence
  human ApoB siRNA sequence
cctgcgcaacgagatcaagacac

SEQ ID NO: 8980 - DNA, 23 bp, Artificial Sequence
  human ApoB siRNA sequence
ctgcgcaacgagatcaagacact

SEQ ID NO: 8981 - DNA, 23 bp, Artificial Sequence
  human ApoB siRNA sequence
tgcgcaacgagatcaagacactg

SEQ ID NO: 8982 - DNA, 23 bp, Artificial Sequence
  human ApoB siRNA sequence
gcgcaacgagatcaagacactgt

SEQ ID NO: 8983 - DNA, 23 bp, Artificial Sequence
  human ApoB siRNA sequence
cgcaacgagatcaagacactgtt

SEQ ID NO: 8984 - DNA, 23 bp, Artificial Sequence
  human ApoB siRNA sequence
gcaacgagatcaagacactgttg

SEQ ID NO: 8985 - DNA, 23 bp, Artificial Sequence
  human ApoB siRNA sequence
caacgagatcaagacactgttga

SEQ ID NO: 8986 - DNA, 23 bp, Artificial Sequence
  human ApoB siRNA sequence
aacgagatcaagacactgttgaa

SEQ ID NO: 8987 - DNA, 23 bp, Artificial Sequence
  human ApoB siRNA sequence
acgagatcaagacactgttgaaa

SEQ ID NO: 8988 - DNA, 23 bp, Artificial Sequence
  human ApoB siRNA sequence
cgagatcaagacactgttgaaag

SEQ ID NO: 8989 - DNA, 23 bp, Artificial Sequence
  human ApoB siRNA sequence
gagatcaagacactgttgaaagc

SEQ ID NO: 8990 - DNA, 23 bp, Artificial Sequence
  human ApoB siRNA sequence
agatcaagacactgttgaaagct

SEQ ID NO: 8991 - DNA, 23 bp, Artificial Sequence
  human ApoB siRNA sequence
gatcaagacactgttgaaagctg

SEQ ID NO: 8992 - DNA, 23 bp, Artificial Sequence
  human ApoB siRNA sequence
atcaagacactgttgaaagctgg

SEQ ID NO: 8993 - DNA, 23 bp, Artificial Sequence
  human ApoB siRNA sequence
tcaagacactgttgaaagctggc

SEQ ID NO: 8994 - DNA, 23 bp, Artificial Sequence
  human ApoB siRNA sequence
caagacactgttgaaagctggcc

SEQ ID NO: 8995 - DNA, 23 bp, Artificial Sequence
  human ApoB siRNA sequence
aagacactgttgaaagctggcca

SEQ ID NO: 8996 - DNA, 23 bp, Artificial Sequence
  human ApoB siRNA sequence
agacactgttgaaagctggccac

SEQ ID NO: 8997 - DNA, 23 bp, Artificial Sequence
  human ApoB siRNA sequence
gacactgttgaaagctggccaca

SEQ ID NO: 8998 - DNA, 23 bp, Artificial Sequence
  human ApoB siRNA sequence
acactgttgaaagctggccacat

SEQ ID NO: 8999 - DNA, 23 bp, Artificial Sequence
  human ApoB siRNA sequence
cactgttgaaagctggccacata

SEQ ID NO: 9000 - DNA, 23 bp, Artificial Sequence
  human ApoB siRNA sequence
actgttgaaagctggccacatag

SEQ ID NO: 9001 - DNA, 23 bp, Artificial Sequence
  human ApoB siRNA sequence
ctgttgaaagctggccacatagc

SEQ ID NO: 9002 - DNA, 23 bp, Artificial Sequence
  human ApoB siRNA sequence
tgttgaaagctggccacatagca

SEQ ID NO: 9003 - DNA, 23 bp, Artificial Sequence
  human ApoB siRNA sequence
gttgaaagctggccacatagcat

SEQ ID NO: 9004 - DNA, 23 bp, Artificial Sequence
  human ApoB siRNA sequence
ttgaaagctggccacatagcatg

SEQ ID NO: 9005 - DNA, 23 bp, Artificial Sequence
  human ApoB siRNA sequence
tgaaagctggccacatagcatgg

SEQ ID NO: 9006 - DNA, 23 bp, Artificial Sequence
  human ApoB siRNA sequence
gaaagctggccacatagcatgga

SEQ ID NO: 9007 - DNA, 23 bp, Artificial Sequence
  human ApoB siRNA sequence
aaagctggccacatagcatggac

SEQ ID NO: 9008 - DNA, 23 bp, Artificial Sequence
  human ApoB siRNA sequence
aagctggccacatagcatggact

SEQ ID NO: 9009 - DNA, 23 bp, Artificial Sequence
  human ApoB siRNA sequence
agctggccacatagcatggactt

SEQ ID NO: 9010 - DNA, 23 bp, Artificial Sequence
  human ApoB siRNA sequence
gctggccacatagcatggacttc

SEQ ID NO: 9011 - DNA, 23 bp, Artificial Sequence
  human ApoB siRNA sequence
ctggccacatagcatggacttct

SEQ ID NO: 9012 - DNA, 23 bp, Artificial Sequence
  human ApoB siRNA sequence
tggccacatagcatggacttctt

SEQ ID NO: 9013 - DNA, 23 bp, Artificial Sequence
  human ApoB siRNA sequence
ggccacatagcatggacttcttc

SEQ ID NO: 9014 - DNA, 23 bp, Artificial Sequence
  human ApoB siRNA sequence
gccacatagcatggacttcttct

SEQ ID NO: 9015 - DNA, 23 bp, Artificial Sequence
  human ApoB siRNA sequence
ccacatagcatggacttcttctg

SEQ ID NO: 9016 - DNA, 23 bp, Artificial Sequence
  human ApoB siRNA sequence
cacatagcatggacttcttctgg

SEQ ID NO: 9017 - DNA, 23 bp, Artificial Sequence
  human ApoB siRNA sequence
acatagcatggacttcttctgga

SEQ ID NO: 9018 - DNA, 23 bp, Artificial Sequence
  human ApoB siRNA sequence
catagcatggacttcttctggaa

SEQ ID NO: 9019 - DNA, 23 bp, Artificial Sequence
  human ApoB siRNA sequence
atagcatggacttcttctggaaa

SEQ ID NO: 9020 - DNA, 23 bp, Artificial Sequence
  human ApoB siRNA sequence
tagcatggacttcttctggaaaa

SEQ ID NO: 9021 - DNA, 23 bp, Artificial Sequence
  human ApoB siRNA sequence
agcatggacttcttctggaaaag

SEQ ID NO: 9022 - DNA, 23 bp, Artificial Sequence
  human ApoB siRNA sequence
gcatggacttcttctggaaaagg

SEQ ID NO: 9023 - DNA, 23 bp, Artificial Sequence
  human ApoB siRNA sequence
catggacttcttctggaaaaggg

SEQ ID NO: 9024 - DNA, 23 bp, Artificial Sequence
  human ApoB siRNA sequence
atggacttcttctggaaaagggt

SEQ ID NO: 9025 - DNA, 23 bp, Artificial Sequence
  human ApoB siRNA sequence
tggacttcttctggaaaagggtc

SEQ ID NO: 9026 - DNA, 23 bp, Artificial Sequence
  human ApoB siRNA sequence
ggacttcttctggaaaagggtca

SEQ ID NO: 9027 - DNA, 23 bp, Artificial Sequence
  human ApoB siRNA sequence
gacttcttctggaaaagggtcat

SEQ ID NO: 9028 - DNA, 23 bp, Artificial Sequence
  human ApoB siRNA sequence
acttcttctggaaaagggtcatg

SEQ ID NO: 9029 - DNA, 23 bp, Artificial Sequence
  human ApoB siRNA sequence
cttcttctggaaaagggtcatgg

SEQ ID NO: 9030 - DNA, 23 bp, Artificial Sequence
  human ApoB siRNA sequence
ttcttctggaaaagggtcatgga

SEQ ID NO: 9031 - DNA, 23 bp, Artificial Sequence
  human ApoB siRNA sequence
tcttctggaaaagggtcatggaa

SEQ ID NO: 9032 - DNA, 23 bp, Artificial Sequence
  human ApoB siRNA sequence
cttctggaaaagggtcatggaaa

SEQ ID NO: 9033 - DNA, 23 bp, Artificial Sequence
  human ApoB siRNA sequence
ttctggaaaagggtcatggaaat

SEQ ID NO: 9034 - DNA, 23 bp, Artificial Sequence
  human ApoB siRNA sequence
tctggaaaagggtcatggaaatg

SEQ ID NO: 9035 - DNA, 23 bp, Artificial Sequence
  human ApoB siRNA sequence
ctggaaaagggtcatggaaatgg

SEQ ID NO: 9036 - DNA, 23 bp, Artificial Sequence
  human ApoB siRNA sequence
tggaaaagggtcatggaaatggg

SEQ ID NO: 9037 - DNA, 23 bp, Artificial Sequence
  human ApoB siRNA sequence
ggaaaagggtcatggaaatgggc

SEQ ID NO: 9038 - DNA, 23 bp, Artificial Sequence
  human ApoB siRNA sequence
gaaaagggtcatggaaatgggcc

SEQ ID NO: 9039 - DNA, 23 bp, Artificial Sequence
  human ApoB siRNA sequence
aaaagggtcatggaaatgggcct

SEQ ID NO: 9040 - DNA, 23 bp, Artificial Sequence
  human ApoB siRNA sequence
aaagggtcatggaaatgggcctg

SEQ ID NO: 9041 - DNA, 23 bp, Artificial Sequence
  human ApoB siRNA sequence
aagggtcatggaaatgggcctgc

SEQ ID NO: 9042 - DNA, 23 bp, Artificial Sequence
  human ApoB siRNA sequence
agggtcatggaaatgggcctgcc

SEQ ID NO: 9043 - DNA, 23 bp, Artificial Sequence
  human ApoB siRNA sequence
gggtcatggaaatgggcctgccc

SEQ ID NO: 9044 - DNA, 23 bp, Artificial Sequence
  human ApoB siRNA sequence
ggtcatggaaatgggcctgcccc

SEQ ID NO: 9045 - DNA, 23 bp, Artificial Sequence
  human ApoB siRNA sequence
gtcatggaaatgggcctgcccca

SEQ ID NO: 9046 - DNA, 23 bp, Artificial Sequence
  human ApoB siRNA sequence
tcatggaaatgggcctgccccag

SEQ ID NO: 9047 - DNA, 23 bp, Artificial Sequence
  human ApoB siRNA sequence
catggaaatgggcctgccccaga

SEQ ID NO: 9048 - DNA, 23 bp, Artificial Sequence
  human ApoB siRNA sequence
atggaaatgggcctgccccagat

SEQ ID NO: 9049 - DNA, 23 bp, Artificial Sequence
  human ApoB siRNA sequence
tggaaatgggcctgccccagatt

SEQ ID NO: 9050 - DNA, 23 bp, Artificial Sequence
  human ApoB siRNA sequence
ggaaatgggcctgccccagattc

SEQ ID NO: 9051 - DNA, 23 bp, Artificial Sequence
  human ApoB siRNA sequence
gaaatgggcctgccccagattct

SEQ ID NO: 9052 - DNA, 23 bp, Artificial Sequence
  human ApoB siRNA sequence
aaatgggcctgccccagattctc

SEQ ID NO: 9053 - DNA, 23 bp, Artificial Sequence
  human ApoB siRNA sequence
aatgggcctgccccagattctca

SEQ ID NO: 9054 - DNA, 23 bp, Artificial Sequence
  human ApoB siRNA sequence
atgggcctgccccagattctcag

SEQ ID NO: 9055 - DNA, 23 bp, Artificial Sequence
  human ApoB siRNA sequence
tgggcctgccccagattctcaga

SEQ ID NO: 9056 - DNA, 23 bp, Artificial Sequence
  human ApoB siRNA sequence
gggcctgccccagattctcagat

SEQ ID NO: 9057 - DNA, 23 bp, Artificial Sequence
  human ApoB siRNA sequence
ggcctgccccagattctcagatg

SEQ ID NO: 9058 - DNA, 23 bp, Artificial Sequence
  human ApoB siRNA sequence
gcctgccccagattctcagatga

SEQ ID NO: 9059 - DNA, 23 bp, Artificial Sequence
  human ApoB siRNA sequence
cctgccccagattctcagatgag

SEQ ID NO: 9060 - DNA, 23 bp, Artificial Sequence
  human ApoB siRNA sequence
ctgccccagattctcagatgagg

SEQ ID NO: 9061 - DNA, 23 bp, Artificial Sequence
  human ApoB siRNA sequence
tgccccagattctcagatgaggg

SEQ ID NO: 9062 - DNA, 23 bp, Artificial Sequence
  human ApoB siRNA sequence
gccccagattctcagatgaggga

SEQ ID NO: 9063 - DNA, 23 bp, Artificial Sequence
  human ApoB siRNA sequence
ccccagattctcagatgagggaa

SEQ ID NO: 9064 - DNA, 23 bp, Artificial Sequence
  human ApoB siRNA sequence
cccagattctcagatgagggaac

SEQ ID NO: 9065 - DNA, 23 bp, Artificial Sequence
  human ApoB siRNA sequence
ccagattctcagatgagggaaca

SEQ ID NO: 9066 - DNA, 23 bp, Artificial Sequence
  human ApoB siRNA sequence
cagattctcagatgagggaacac

SEQ ID NO: 9067 - DNA, 23 bp, Artificial Sequence
  human ApoB siRNA sequence
agattctcagatgagggaacaca

SEQ ID NO: 9068 - DNA, 23 bp, Artificial Sequence
  human ApoB siRNA sequence
gattctcagatgagggaacacat

SEQ ID NO: 9069 - DNA, 23 bp, Artificial Sequence
  human ApoB siRNA sequence
attctcagatgagggaacacatg

SEQ ID NO: 9070 - DNA, 23 bp, Artificial Sequence
  human ApoB siRNA sequence
ttctcagatgagggaacacatga

SEQ ID NO: 9071 - DNA, 23 bp, Artificial Sequence
  human ApoB siRNA sequence
tctcagatgagggaacacatgaa

SEQ ID NO: 9072 - DNA, 23 bp, Artificial Sequence
  human ApoB siRNA sequence
ctcagatgagggaacacatgaat

SEQ ID NO: 9073 - DNA, 23 bp, Artificial Sequence
  human ApoB siRNA sequence
tcagatgagggaacacatgaatc

SEQ ID NO: 9074 - DNA, 23 bp, Artificial Sequence
  human ApoB siRNA sequence
cagatgagggaacacatgaatca

SEQ ID NO: 9075 - DNA, 23 bp, Artificial Sequence
  human ApoB siRNA sequence
agatgagggaacacatgaatcac

SEQ ID NO: 9076 - DNA, 23 bp, Artificial Sequence
  human ApoB siRNA sequence
gatgagggaacacatgaatcaca

SEQ ID NO: 9077 - DNA, 23 bp, Artificial Sequence
  human ApoB siRNA sequence
atgagggaacacatgaatcacaa

SEQ ID NO: 9078 - DNA, 23 bp, Artificial Sequence
  human ApoB siRNA sequence
tgagggaacacatgaatcacaaa

SEQ ID NO: 9079 - DNA, 23 bp, Artificial Sequence
  human ApoB siRNA sequence
gagggaacacatgaatcacaaat

SEQ ID NO: 9080 - DNA, 23 bp, Artificial Sequence
  human ApoB siRNA sequence
agggaacacatgaatcacaaatt

SEQ ID NO: 9081 - DNA, 23 bp, Artificial Sequence
  human ApoB siRNA sequence
gggaacacatgaatcacaaatta

SEQ ID NO: 9082 - DNA, 23 bp, Artificial Sequence
  human ApoB siRNA sequence
ggaacacatgaatcacaaattag

SEQ ID NO: 9083 - DNA, 23 bp, Artificial Sequence
  human ApoB siRNA sequence
gaacacatgaatcacaaattagt

SEQ ID NO: 9084 - DNA, 23 bp, Artificial Sequence
  human ApoB siRNA sequence
aacacatgaatcacaaattagtt

SEQ ID NO: 9085 - DNA, 23 bp, Artificial Sequence
  human ApoB siRNA sequence
acacatgaatcacaaattagttt

SEQ ID NO: 9086 - DNA, 23 bp, Artificial Sequence
  human ApoB siRNA sequence
cacatgaatcacaaattagtttc

SEQ ID NO: 9087 - DNA, 23 bp, Artificial Sequence
  human ApoB siRNA sequence
acatgaatcacaaattagtttca

SEQ ID NO: 9088 - DNA, 23 bp, Artificial Sequence
  human ApoB siRNA sequence
catgaatcacaaattagtttcac

SEQ ID NO: 9089 - DNA, 23 bp, Artificial Sequence
  human ApoB siRNA sequence
atgaatcacaaattagtttcacc

SEQ ID NO: 9090 - DNA, 23 bp, Artificial Sequence
  human ApoB siRNA sequence
tgaatcacaaattagtttcacca

SEQ ID NO: 9091 - DNA, 23 bp, Artificial Sequence
  human ApoB siRNA sequence
gaatcacaaattagtttcaccat

SEQ ID NO: 9092 - DNA, 23 bp, Artificial Sequence
  human ApoB siRNA sequence
aatcacaaattagtttcaccata

SEQ ID NO: 9093 - DNA, 23 bp, Artificial Sequence
  human ApoB siRNA sequence
atcacaaattagtttcaccatag

SEQ ID NO: 9094 - DNA, 23 bp, Artificial Sequence
  human ApoB siRNA sequence
tcacaaattagtttcaccataga

SEQ ID NO: 9095 - DNA, 23 bp, Artificial Sequence
  human ApoB siRNA sequence
cacaaattagtttcaccatagaa

SEQ ID NO: 9096 - DNA, 23 bp, Artificial Sequence
  human ApoB siRNA sequence
acaaattagtttcaccatagaag

SEQ ID NO: 9097 - DNA, 23 bp, Artificial Sequence
  human ApoB siRNA sequence
caaattagtttcaccatagaagg

SEQ ID NO: 9098 - DNA, 23 bp, Artificial Sequence
  human ApoB siRNA sequence
aaattagtttcaccatagaagga

SEQ ID NO: 9099 - DNA, 23 bp, Artificial Sequence
  human ApoB siRNA sequence
aattagtttcaccatagaaggac

SEQ ID NO: 9100 - DNA, 23 bp, Artificial Sequence
  human ApoB siRNA sequence
attagtttcaccatagaaggacc

SEQ ID NO: 9101 - DNA, 23 bp, Artificial Sequence
  human ApoB siRNA sequence
ttagtttcaccatagaaggaccc

SEQ ID NO: 9102 - DNA, 23 bp, Artificial Sequence
  human ApoB siRNA sequence
tagtttcaccatagaaggacccc

SEQ ID NO: 9103 - DNA, 23 bp, Artificial Sequence
  human ApoB siRNA sequence
agtttcaccatagaaggacccct

SEQ ID NO: 9104 - DNA, 23 bp, Artificial Sequence
  human ApoB siRNA sequence
gtttcaccatagaaggacccctc

SEQ ID NO: 9105 - DNA, 23 bp, Artificial Sequence
  human ApoB siRNA sequence
tttcaccatagaaggacccctca

SEQ ID NO: 9106 - DNA, 23 bp, Artificial Sequence
  human ApoB siRNA sequence
ttcaccatagaaggacccctcac

SEQ ID NO: 9107 - DNA, 23 bp, Artificial Sequence
  human ApoB siRNA sequence
tcaccatagaaggacccctcact

SEQ ID NO: 9108 - DNA, 23 bp, Artificial Sequence
  human ApoB siRNA sequence
caccatagaaggacccctcactt

SEQ ID NO: 9109 - DNA, 23 bp, Artificial Sequence
  human ApoB siRNA sequence
accatagaaggacccctcacttc

SEQ ID NO: 9110 - DNA, 23 bp, Artificial Sequence
  human ApoB siRNA sequence
ccatagaaggacccctcacttcc

SEQ ID NO: 9111 - DNA, 23 bp, Artificial Sequence
  human ApoB siRNA sequence
catagaaggacccctcacttcct

SEQ ID NO: 9112 - DNA, 23 bp, Artificial Sequence
  human ApoB siRNA sequence
atagaaggacccctcacttcctt

SEQ ID NO: 9113 - DNA, 23 bp, Artificial Sequence
  human ApoB siRNA sequence
tagaaggacccctcacttccttt

SEQ ID NO: 9114 - DNA, 23 bp, Artificial Sequence
  human ApoB siRNA sequence
agaaggacccctcacttcctttg

SEQ ID NO: 9115 - DNA, 23 bp, Artificial Sequence
  human ApoB siRNA sequence
gaaggacccctcacttcctttgg

SEQ ID NO: 9116 - DNA, 23 bp, Artificial Sequence
  human ApoB siRNA sequence
aaggacccctcacttcctttgga

SEQ ID NO: 9117 - DNA, 23 bp, Artificial Sequence
  human ApoB siRNA sequence
aggacccctcacttcctttggac

SEQ ID NO: 9118 - DNA, 23 bp, Artificial Sequence
  human ApoB siRNA sequence
ggacccctcacttcctttggact

SEQ ID NO: 9119 - DNA, 23 bp, Artificial Sequence
  human ApoB siRNA sequence
gacccctcacttcctttggactg

SEQ ID NO: 9120 - DNA, 23 bp, Artificial Sequence
  human ApoB siRNA sequence
acccctcacttcctttggactgt

SEQ ID NO: 9121 - DNA, 23 bp, Artificial Sequence
  human ApoB siRNA sequence
cccctcacttcctttggactgtc

SEQ ID NO: 9122 - DNA, 23 bp, Artificial Sequence
  human ApoB siRNA sequence
ccctcacttcctttggactgtcc

SEQ ID NO: 9123 - DNA, 23 bp, Artificial Sequence
  human ApoB siRNA sequence
cctcacttcctttggactgtcca

SEQ ID NO: 9124 - DNA, 23 bp, Artificial Sequence
  human ApoB siRNA sequence
ctcacttcctttggactgtccaa

SEQ ID NO: 9125 - DNA, 23 bp, Artificial Sequence
  human ApoB siRNA sequence
tcacttcctttggactgtccaat

SEQ ID NO: 9126 - DNA, 23 bp, Artificial Sequence
  human ApoB siRNA sequence
cacttcctttggactgtccaata

SEQ ID NO: 9127 - DNA, 23 bp, Artificial Sequence
  human ApoB siRNA sequence
acttcctttggactgtccaataa

SEQ ID NO: 9128 - DNA, 23 bp, Artificial Sequence
  human ApoB siRNA sequence
cttcctttggactgtccaataag

SEQ ID NO: 9129 - DNA, 23 bp, Artificial Sequence
  human ApoB siRNA sequence
ttcctttggactgtccaataaga

SEQ ID NO: 9130 - DNA, 23 bp, Artificial Sequence
  human ApoB siRNA sequence
tcctttggactgtccaataagat

SEQ ID NO: 9131 - DNA, 23 bp, Artificial Sequence
  human ApoB siRNA sequence
cctttggactgtccaataagatc

SEQ ID NO: 9132 - DNA, 23 bp, Artificial Sequence
  human ApoB siRNA sequence
ctttggactgtccaataagatca

SEQ ID NO: 9133 - DNA, 23 bp, Artificial Sequence
  human ApoB siRNA sequence
tttggactgtccaataagatcaa

SEQ ID NO: 9134 - DNA, 23 bp, Artificial Sequence
  human ApoB siRNA sequence
ttggactgtccaataagatcaat

SEQ ID NO: 9135 - DNA, 23 bp, Artificial Sequence
  human ApoB siRNA sequence
tggactgtccaataagatcaata

SEQ ID NO: 9136 - DNA, 23 bp, Artificial Sequence
  human ApoB siRNA sequence
ggactgtccaataagatcaatag

SEQ ID NO: 9137 - DNA, 23 bp, Artificial Sequence
  human ApoB siRNA sequence
gactgtccaataagatcaatagc

SEQ ID NO: 9138 - DNA, 23 bp, Artificial Sequence
  human ApoB siRNA sequence
actgtccaataagatcaatagca

SEQ ID NO: 9139 - DNA, 23 bp, Artificial Sequence
  human ApoB siRNA sequence
ctgtccaataagatcaatagcaa

SEQ ID NO: 9140 - DNA, 23 bp, Artificial Sequence
  human ApoB siRNA sequence
tgtccaataagatcaatagcaaa

SEQ ID NO: 9141 - DNA, 23 bp, Artificial Sequence
  human ApoB siRNA sequence
gtccaataagatcaatagcaaac

SEQ ID NO: 9142 - DNA, 23 bp, Artificial Sequence
  human ApoB siRNA sequence
tccaataagatcaatagcaaaca

SEQ ID NO: 9143 - DNA, 23 bp, Artificial Sequence
  human ApoB siRNA sequence
ccaataagatcaatagcaaacac

SEQ ID NO: 9144 - DNA, 23 bp, Artificial Sequence
  human ApoB siRNA sequence
caataagatcaatagcaaacacc

SEQ ID NO: 9145 - DNA, 23 bp, Artificial Sequence
  human ApoB siRNA sequence
aataagatcaatagcaaacacct

SEQ ID NO: 9146 - DNA, 23 bp, Artificial Sequence
  human ApoB siRNA sequence
ataagatcaatagcaaacaccta

SEQ ID NO: 9147 - DNA, 23 bp, Artificial Sequence
  human ApoB siRNA sequence
taagatcaatagcaaacacctaa

SEQ ID NO: 9148 - DNA, 23 bp, Artificial Sequence
  human ApoB siRNA sequence
aagatcaatagcaaacacctaag

SEQ ID NO: 9149 - DNA, 23 bp, Artificial Sequence
  human ApoB siRNA sequence
agatcaatagcaaacacctaaga

SEQ ID NO: 9150 - DNA, 23 bp, Artificial Sequence
  human ApoB siRNA sequence
gatcaatagcaaacacctaagag

SEQ ID NO: 9151 - DNA, 23 bp, Artificial Sequence
  human ApoB siRNA sequence
atcaatagcaaacacctaagagt

SEQ ID NO: 9152 - DNA, 23 bp, Artificial Sequence
  human ApoB siRNA sequence
tcaatagcaaacacctaagagta

SEQ ID NO: 9153 - DNA, 23 bp, Artificial Sequence
  human ApoB siRNA sequence
caatagcaaacacctaagagtaa

SEQ ID NO: 9154 - DNA, 23 bp, Artificial Sequence
  human ApoB siRNA sequence
aatagcaaacacctaagagtaaa

SEQ ID NO: 9155 - DNA, 23 bp, Artificial Sequence
  human ApoB siRNA sequence
atagcaaacacctaagagtaaac

SEQ ID NO: 9156 - DNA, 23 bp, Artificial Sequence
  human ApoB siRNA sequence
tagcaaacacctaagagtaaacc

SEQ ID NO: 9157 - DNA, 23 bp, Artificial Sequence
  human ApoB siRNA sequence
agcaaacacctaagagtaaacca

SEQ ID NO: 9158 - DNA, 23 bp, Artificial Sequence
  human ApoB siRNA sequence
gcaaacacctaagagtaaaccaa

SEQ ID NO: 9159 - DNA, 23 bp, Artificial Sequence
  human ApoB siRNA sequence
caaacacctaagagtaaaccaaa

SEQ ID NO: 9160 - DNA, 23 bp, Artificial Sequence
  human ApoB siRNA sequence
aaacacctaagagtaaaccaaaa

SEQ ID NO: 9161 - DNA, 23 bp, Artificial Sequence
  human ApoB siRNA sequence
aacacctaagagtaaaccaaaac

SEQ ID NO: 9162 - DNA, 23 bp, Artificial Sequence
  human ApoB siRNA sequence
acacctaagagtaaaccaaaact

SEQ ID NO: 9163 - DNA, 23 bp, Artificial Sequence
  human ApoB siRNA sequence
cacctaagagtaaaccaaaactt

SEQ ID NO: 9164 - DNA, 23 bp, Artificial Sequence
  human ApoB siRNA sequence
acctaagagtaaaccaaaacttg

SEQ ID NO: 9165 - DNA, 23 bp, Artificial Sequence
  human ApoB siRNA sequence
cctaagagtaaaccaaaacttgg

SEQ ID NO: 9166 - DNA, 23 bp, Artificial Sequence
  human ApoB siRNA sequence
ctaagagtaaaccaaaacttggt

SEQ ID NO: 9167 - DNA, 23 bp, Artificial Sequence
  human ApoB siRNA sequence
taagagtaaaccaaaacttggtt

SEQ ID NO: 9168 - DNA, 23 bp, Artificial Sequence
  human ApoB siRNA sequence
aagagtaaaccaaaacttggttt

SEQ ID NO: 9169 - DNA, 23 bp, Artificial Sequence
  human ApoB siRNA sequence
agagtaaaccaaaacttggttta

SEQ ID NO: 9170 - DNA, 23 bp, Artificial Sequence
  human ApoB siRNA sequence
gagtaaaccaaaacttggtttat

SEQ ID NO: 9171 - DNA, 23 bp, Artificial Sequence
  human ApoB siRNA sequence
agtaaaccaaaacttggtttatg

SEQ ID NO: 9172 - DNA, 23 bp, Artificial Sequence
  human ApoB siRNA sequence
gtaaaccaaaacttggtttatga

SEQ ID NO: 9173 - DNA, 23 bp, Artificial Sequence
  human ApoB siRNA sequence
taaaccaaaacttggtttatgaa

SEQ ID NO: 9174 - DNA, 23 bp, Artificial Sequence
  human ApoB siRNA sequence
aaaccaaaacttggtttatgaat

SEQ ID NO: 9175 - DNA, 23 bp, Artificial Sequence
  human ApoB siRNA sequence
aaccaaaacttggtttatgaatc

SEQ ID NO: 9176 - DNA, 23 bp, Artificial Sequence
  human ApoB siRNA sequence
accaaaacttggtttatgaatct

SEQ ID NO: 9177 - DNA, 23 bp, Artificial Sequence
  human ApoB siRNA sequence
ccaaaacttggtttatgaatctg

SEQ ID NO: 9178 - DNA, 23 bp, Artificial Sequence
  human ApoB siRNA sequence
caaaacttggtttatgaatctgg

SEQ ID NO: 9179 - DNA, 23 bp, Artificial Sequence
  human ApoB siRNA sequence
aaaacttggtttatgaatctggc

SEQ ID NO: 9180 - DNA, 23 bp, Artificial Sequence
  human ApoB siRNA sequence
aaacttggtttatgaatctggct

SEQ ID NO: 9181 - DNA, 23 bp, Artificial Sequence
  human ApoB siRNA sequence
aacttggtttatgaatctggctc

SEQ ID NO: 9182 - DNA, 23 bp, Artificial Sequence
  human ApoB siRNA sequence
acttggtttatgaatctggctcc

SEQ ID NO: 9183 - DNA, 23 bp, Artificial Sequence
  human ApoB siRNA sequence
cttggtttatgaatctggctccc

SEQ ID NO: 9184 - DNA, 23 bp, Artificial Sequence
  human ApoB siRNA sequence
ttggtttatgaatctggctccct

SEQ ID NO: 9185 - DNA, 23 bp, Artificial Sequence
  human ApoB siRNA sequence
tggtttatgaatctggctccctc

SEQ ID NO: 9186 - DNA, 23 bp, Artificial Sequence
  human ApoB siRNA sequence
ggtttatgaatctggctccctca

SEQ ID NO: 9187 - DNA, 23 bp, Artificial Sequence
  human ApoB siRNA sequence
gtttatgaatctggctccctcaa

SEQ ID NO: 9188 - DNA, 23 bp, Artificial Sequence
  human ApoB siRNA sequence
tttatgaatctggctccctcaac

SEQ ID NO: 9189 - DNA, 23 bp, Artificial Sequence
  human ApoB siRNA sequence
ttatgaatctggctccctcaact

SEQ ID NO: 9190 - DNA, 23 bp, Artificial Sequence
  human ApoB siRNA sequence
tatgaatctggctccctcaactt

SEQ ID NO: 9191 - DNA, 23 bp, Artificial Sequence
  human ApoB siRNA sequence
atgaatctggctccctcaacttt

SEQ ID NO: 9192 - DNA, 23 bp, Artificial Sequence
  human ApoB siRNA sequence
tgaatctggctccctcaactttt

SEQ ID NO: 9193 - DNA, 23 bp, Artificial Sequence
  human ApoB siRNA sequence
gaatctggctccctcaacttttc

SEQ ID NO: 9194 - DNA, 23 bp, Artificial Sequence
  human ApoB siRNA sequence
aatctggctccctcaacttttct

SEQ ID NO: 9195 - DNA, 23 bp, Artificial Sequence
  human ApoB siRNA sequence
atctggctccctcaacttttcta

SEQ ID NO: 9196 - DNA, 23 bp, Artificial Sequence
  human ApoB siRNA sequence
tctggctccctcaacttttctaa

SEQ ID NO: 9197 - DNA, 23 bp, Artificial Sequence
  human ApoB siRNA sequence
ctggctccctcaacttttctaaa

SEQ ID NO: 9198 - DNA, 23 bp, Artificial Sequence
  human ApoB siRNA sequence
tggctccctcaacttttctaaac

SEQ ID NO: 9199 - DNA, 23 bp, Artificial Sequence
  human ApoB siRNA sequence
ggctccctcaacttttctaaact

SEQ ID NO: 9200 - DNA, 23 bp, Artificial Sequence
  human ApoB siRNA sequence
gctccctcaacttttctaaactt

SEQ ID NO: 9201 - DNA, 23 bp, Artificial Sequence
  human ApoB siRNA sequence
ctccctcaacttttctaaacttg

SEQ ID NO: 9202 - DNA, 23 bp, Artificial Sequence
  human ApoB siRNA sequence
tccctcaacttttctaaacttga

SEQ ID NO: 9203 - DNA, 23 bp, Artificial Sequence
  human ApoB siRNA sequence
ccctcaacttttctaaacttgaa

SEQ ID NO: 9204 - DNA, 23 bp, Artificial Sequence
  human ApoB siRNA sequence
cctcaacttttctaaacttgaaa

SEQ ID NO: 9205 - DNA, 23 bp, Artificial Sequence
  human ApoB siRNA sequence
ctcaacttttctaaacttgaaat

SEQ ID NO: 9206 - DNA, 23 bp, Artificial Sequence
  human ApoB siRNA sequence
tcaacttttctaaacttgaaatt

SEQ ID NO: 9207 - DNA, 23 bp, Artificial Sequence
  human ApoB siRNA sequence
caacttttctaaacttgaaattc

SEQ ID NO: 9208 - DNA, 23 bp, Artificial Sequence
  human ApoB siRNA sequence
aacttttctaaacttgaaattca

SEQ ID NO: 9209 - DNA, 23 bp, Artificial Sequence
  human ApoB siRNA sequence
acttttctaaacttgaaattcaa

SEQ ID NO: 9210 - DNA, 23 bp, Artificial Sequence
  human ApoB siRNA sequence
cttttctaaacttgaaattcaat

SEQ ID NO: 9211 - DNA, 23 bp, Artificial Sequence
  human ApoB siRNA sequence
ttttctaaacttgaaattcaatc

SEQ ID NO: 9212 - DNA, 23 bp, Artificial Sequence
  human ApoB siRNA sequence
tttctaaacttgaaattcaatca

SEQ ID NO: 9213 - DNA, 23 bp, Artificial Sequence
  human ApoB siRNA sequence
ttctaaacttgaaattcaatcac

SEQ ID NO: 9214 - DNA, 23 bp, Artificial Sequence
  human ApoB siRNA sequence
tctaaacttgaaattcaatcaca

SEQ ID NO: 9215 - DNA, 23 bp, Artificial Sequence
  human ApoB siRNA sequence
ctaaacttgaaattcaatcacaa

SEQ ID NO: 9216 - DNA, 23 bp, Artificial Sequence
  human ApoB siRNA sequence
taaacttgaaattcaatcacaag

SEQ ID NO: 9217 - DNA, 23 bp, Artificial Sequence
  human ApoB siRNA sequence
aaacttgaaattcaatcacaagt

SEQ ID NO: 9218 - DNA, 23 bp, Artificial Sequence
  human ApoB siRNA sequence
aacttgaaattcaatcacaagtc

SEQ ID NO: 9219 - DNA, 23 bp, Artificial Sequence
  human ApoB siRNA sequence
acttgaaattcaatcacaagtcg

SEQ ID NO: 9220 - DNA, 23 bp, Artificial Sequence
  human ApoB siRNA sequence
cttgaaattcaatcacaagtcga

SEQ ID NO: 9221 - DNA, 23 bp, Artificial Sequence
  human ApoB siRNA sequence
ttgaaattcaatcacaagtcgat

SEQ ID NO: 9222 - DNA, 23 bp, Artificial Sequence
  human ApoB siRNA sequence
tgaaattcaatcacaagtcgatt

SEQ ID NO: 9223 - DNA, 23 bp, Artificial Sequence
  human ApoB siRNA sequence
gaaattcaatcacaagtcgattc

SEQ ID NO: 9224 - DNA, 23 bp, Artificial Sequence
  human ApoB siRNA sequence
aaattcaatcacaagtcgattcc

SEQ ID NO: 9225 - DNA, 23 bp, Artificial Sequence
  human ApoB siRNA sequence
aattcaatcacaagtcgattccc

SEQ ID NO: 9226 - DNA, 23 bp, Artificial Sequence
  human ApoB siRNA sequence
attcaatcacaagtcgattccca

SEQ ID NO: 9227 - DNA, 23 bp, Artificial Sequence
  human ApoB siRNA sequence
ttcaatcacaagtcgattcccag

SEQ ID NO: 9228 - DNA, 23 bp, Artificial Sequence
  human ApoB siRNA sequence
tcaatcacaagtcgattcccagc

SEQ ID NO: 9229 - DNA, 23 bp, Artificial Sequence
  human ApoB siRNA sequence
caatcacaagtcgattcccagca

SEQ ID NO: 9230 - DNA, 23 bp, Artificial Sequence
  human ApoB siRNA sequence
aatcacaagtcgattcccagcat

SEQ ID NO: 9231 - DNA, 23 bp, Artificial Sequence
  human ApoB siRNA sequence
atcacaagtcgattcccagcatg

SEQ ID NO: 9232 - DNA, 23 bp, Artificial Sequence
  human ApoB siRNA sequence
tcacaagtcgattcccagcatgt

SEQ ID NO: 9233 - DNA, 23 bp, Artificial Sequence
  human ApoB siRNA sequence
cacaagtcgattcccagcatgtg

SEQ ID NO: 9234 - DNA, 23 bp, Artificial Sequence
  human ApoB siRNA sequence
acaagtcgattcccagcatgtgg

SEQ ID NO: 9235 - DNA, 23 bp, Artificial Sequence
  human ApoB siRNA sequence
caagtcgattcccagcatgtggg

SEQ ID NO: 9236 - DNA, 23 bp, Artificial Sequence
  human ApoB siRNA sequence
aagtcgattcccagcatgtgggc

SEQ ID NO: 9237 - DNA, 23 bp, Artificial Sequence
  human ApoB siRNA sequence
agtcgattcccagcatgtgggcc

SEQ ID NO: 9238 - DNA, 23 bp, Artificial Sequence
  human ApoB siRNA sequence
gtcgattcccagcatgtgggcca

SEQ ID NO: 9239 - DNA, 23 bp, Artificial Sequence
  human ApoB siRNA sequence
tcgattcccagcatgtgggccac

SEQ ID NO: 9240 - DNA, 23 bp, Artificial Sequence
  human ApoB siRNA sequence
cgattcccagcatgtgggccaca

SEQ ID NO: 9241 - DNA, 23 bp, Artificial Sequence
  human ApoB siRNA sequence
gattcccagcatgtgggccacag

SEQ ID NO: 9242 - DNA, 23 bp, Artificial Sequence
  human ApoB siRNA sequence
attcccagcatgtgggccacagt

SEQ ID NO: 9243 - DNA, 23 bp, Artificial Sequence
  human ApoB siRNA sequence
ttcccagcatgtgggccacagtg

SEQ ID NO: 9244 - DNA, 23 bp, Artificial Sequence
  human ApoB siRNA sequence
tcccagcatgtgggccacagtgt

SEQ ID NO: 9245 - DNA, 23 bp, Artificial Sequence
  human ApoB siRNA sequence
cccagcatgtgggccacagtgtt

SEQ ID NO: 9246 - DNA, 23 bp, Artificial Sequence
  human ApoB siRNA sequence
ccagcatgtgggccacagtgttc

SEQ ID NO: 9247 - DNA, 23 bp, Artificial Sequence
  human ApoB siRNA sequence
cagcatgtgggccacagtgttct

SEQ ID NO: 9248 - DNA, 23 bp, Artificial Sequence
  human ApoB siRNA sequence
agcatgtgggccacagtgttcta

SEQ ID NO: 9249 - DNA, 23 bp, Artificial Sequence
  human ApoB siRNA sequence
gcatgtgggccacagtgttctaa

SEQ ID NO: 9250 - DNA, 23 bp, Artificial Sequence
  human ApoB siRNA sequence
catgtgggccacagtgttctaac

SEQ ID NO: 9251 - DNA, 23 bp, Artificial Sequence
  human ApoB siRNA sequence
atgtgggccacagtgttctaact

SEQ ID NO: 9252 - DNA, 23 bp, Artificial Sequence
  human ApoB siRNA sequence
tgtgggccacagtgttctaactg

SEQ ID NO: 9253 - DNA, 23 bp, Artificial Sequence
  human ApoB siRNA sequence
gtgggccacagtgttctaactgc

SEQ ID NO: 9254 - DNA, 23 bp, Artificial Sequence
  human ApoB siRNA sequence
tgggccacagtgttctaactgct

SEQ ID NO: 9255 - DNA, 23 bp, Artificial Sequence
  human ApoB siRNA sequence
gggccacagtgttctaactgcta

SEQ ID NO: 9256 - DNA, 23 bp, Artificial Sequence
  human ApoB siRNA sequence
ggccacagtgttctaactgctaa

SEQ ID NO: 9257 - DNA, 23 bp, Artificial Sequence
  human ApoB siRNA sequence
gccacagtgttctaactgctaaa

SEQ ID NO: 9258 - DNA, 23 bp, Artificial Sequence
  human ApoB siRNA sequence
ccacagtgttctaactgctaaag

SEQ ID NO: 9259 - DNA, 23 bp, Artificial Sequence
  human ApoB siRNA sequence
cacagtgttctaactgctaaagg

SEQ ID NO: 9260 - DNA, 23 bp, Artificial Sequence
  human ApoB siRNA sequence
acagtgttctaactgctaaaggc

SEQ ID NO: 9261 - DNA, 23 bp, Artificial Sequence
  human ApoB siRNA sequence
cagtgttctaactgctaaaggca

SEQ ID NO: 9262 - DNA, 23 bp, Artificial Sequence
  human ApoB siRNA sequence
agtgttctaactgctaaaggcat

SEQ ID NO: 9263 - DNA, 23 bp, Artificial Sequence
  human ApoB siRNA sequence
gtgttctaactgctaaaggcatg

SEQ ID NO: 9264 - DNA, 23 bp, Artificial Sequence
  human ApoB siRNA sequence
tgttctaactgctaaaggcatgg

SEQ ID NO: 9265 - DNA, 23 bp, Artificial Sequence
  human ApoB siRNA sequence
gttctaactgctaaaggcatggc

SEQ ID NO: 9266 - DNA, 23 bp, Artificial Sequence
  human ApoB siRNA sequence
ttctaactgctaaaggcatggca

SEQ ID NO: 9267 - DNA, 23 bp, Artificial Sequence
  human ApoB siRNA sequence
tctaactgctaaaggcatggcac

SEQ ID NO: 9268 - DNA, 23 bp, Artificial Sequence
  human ApoB siRNA sequence
ctaactgctaaaggcatggcact

SEQ ID NO: 9269 - DNA, 23 bp, Artificial Sequence
  human ApoB siRNA sequence
taactgctaaaggcatggcactg

SEQ ID NO: 9270 - DNA, 23 bp, Artificial Sequence
  human ApoB siRNA sequence
aactgctaaaggcatggcactgt

SEQ ID NO: 9271 - DNA, 23 bp, Artificial Sequence
  human ApoB siRNA sequence
actgctaaaggcatggcactgtt

SEQ ID NO: 9272 - DNA, 23 bp, Artificial Sequence
  human ApoB siRNA sequence
ctgctaaaggcatggcactgttt

SEQ ID NO: 9273 - DNA, 23 bp, Artificial Sequence
  human ApoB siRNA sequence
tgctaaaggcatggcactgtttg

SEQ ID NO: 9274 - DNA, 23 bp, Artificial Sequence
  human ApoB siRNA sequence
gctaaaggcatggcactgtttgg

SEQ ID NO: 9275 - DNA, 23 bp, Artificial Sequence
  human ApoB siRNA sequence
ctaaaggcatggcactgtttgga

SEQ ID NO: 9276 - DNA, 23 bp, Artificial Sequence
  human ApoB siRNA sequence
taaaggcatggcactgtttggag

SEQ ID NO: 9277 - DNA, 23 bp, Artificial Sequence
  human ApoB siRNA sequence
aaaggcatggcactgtttggaga

SEQ ID NO: 9278 - DNA, 23 bp, Artificial Sequence
  human ApoB siRNA sequence
aaggcatggcactgtttggagaa

SEQ ID NO: 9279 - DNA, 23 bp, Artificial Sequence
  human ApoB siRNA sequence
aggcatggcactgtttggagaag

SEQ ID NO: 9280 - DNA, 23 bp, Artificial Sequence
  human ApoB siRNA sequence
ggcatggcactgtttggagaagg

SEQ ID NO: 9281 - DNA, 23 bp, Artificial Sequence
  human ApoB siRNA sequence
gcatggcactgtttggagaaggg

SEQ ID NO: 9282 - DNA, 23 bp, Artificial Sequence
  human ApoB siRNA sequence
catggcactgtttggagaaggga

SEQ ID NO: 9283 - DNA, 23 bp, Artificial Sequence
  human ApoB siRNA sequence
atggcactgtttggagaagggaa

SEQ ID NO: 9284 - DNA, 23 bp, Artificial Sequence
  human ApoB siRNA sequence
tggcactgtttggagaagggaag

SEQ ID NO: 9285 - DNA, 23 bp, Artificial Sequence
  human ApoB siRNA sequence
ggcactgtttggagaagggaagg

SEQ ID NO: 9286 - DNA, 23 bp, Artificial Sequence
  human ApoB siRNA sequence
gcactgtttggagaagggaaggc

SEQ ID NO: 9287 - DNA, 23 bp, Artificial Sequence
  human ApoB siRNA sequence
cactgtttggagaagggaaggca

SEQ ID NO: 9288 - DNA, 23 bp, Artificial Sequence
  human ApoB siRNA sequence
actgtttggagaagggaaggcag

SEQ ID NO: 9289 - DNA, 23 bp, Artificial Sequence
  human ApoB siRNA sequence
ctgtttggagaagggaaggcaga

SEQ ID NO: 9290 - DNA, 23 bp, Artificial Sequence
  human ApoB siRNA sequence
tgtttggagaagggaaggcagag

SEQ ID NO: 9291 - DNA, 23 bp, Artificial Sequence
  human ApoB siRNA sequence
gtttggagaagggaaggcagagt

SEQ ID NO: 9292 - DNA, 23 bp, Artificial Sequence
  human ApoB siRNA sequence
tttggagaagggaaggcagagtt

SEQ ID NO: 9293 - DNA, 23 bp, Artificial Sequence
  human ApoB siRNA sequence
ttggagaagggaaggcagagttt

SEQ ID NO: 9294 - DNA, 23 bp, Artificial Sequence
  human ApoB siRNA sequence
tggagaagggaaggcagagttta

SEQ ID NO: 9295 - DNA, 23 bp, Artificial Sequence
  human ApoB siRNA sequence
ggagaagggaaggcagagtttac

SEQ ID NO: 9296 - DNA, 23 bp, Artificial Sequence
  human ApoB siRNA sequence
gagaagggaaggcagagtttact

SEQ ID NO: 9297 - DNA, 23 bp, Artificial Sequence
  human ApoB siRNA sequence
agaagggaaggcagagtttactg

SEQ ID NO: 9298 - DNA, 23 bp, Artificial Sequence
  human ApoB siRNA sequence
gaagggaaggcagagtttactgg

SEQ ID NO: 9299 - DNA, 23 bp, Artificial Sequence
  human ApoB siRNA sequence
aagggaaggcagagtttactggg

SEQ ID NO: 9300 - DNA, 23 bp, Artificial Sequence
  human ApoB siRNA sequence
agggaaggcagagtttactggga

SEQ ID NO: 9301 - DNA, 23 bp, Artificial Sequence
  human ApoB siRNA sequence
gggaaggcagagtttactgggag

SEQ ID NO: 9302 - DNA, 23 bp, Artificial Sequence
  human ApoB siRNA sequence
ggaaggcagagtttactgggagg

SEQ ID NO: 9303 - DNA, 23 bp, Artificial Sequence
  human ApoB siRNA sequence
gaaggcagagtttactgggaggc

SEQ ID NO: 9304 - DNA, 23 bp, Artificial Sequence
  human ApoB siRNA sequence
aaggcagagtttactgggaggca

SEQ ID NO: 9305 - DNA, 23 bp, Artificial Sequence
  human ApoB siRNA sequence
aggcagagtttactgggaggcat

SEQ ID NO: 9306 - DNA, 23 bp, Artificial Sequence
  human ApoB siRNA sequence
ggcagagtttactgggaggcatg

SEQ ID NO: 9307 - DNA, 23 bp, Artificial Sequence
  human ApoB siRNA sequence
gcagagtttactgggaggcatga

SEQ ID NO: 9308 - DNA, 23 bp, Artificial Sequence
  human ApoB siRNA sequence
cagagtttactgggaggcatgat

SEQ ID NO: 9309 - DNA, 23 bp, Artificial Sequence
  human ApoB siRNA sequence
agagtttactgggaggcatgatg

SEQ ID NO: 9310 - DNA, 23 bp, Artificial Sequence
  human ApoB siRNA sequence
gagtttactgggaggcatgatgc

SEQ ID NO: 9311 - DNA, 23 bp, Artificial Sequence
  human ApoB siRNA sequence
agtttactgggaggcatgatgct

SEQ ID NO: 9312 - DNA, 23 bp, Artificial Sequence
  human ApoB siRNA sequence
gtttactgggaggcatgatgctc

SEQ ID NO: 9313 - DNA, 23 bp, Artificial Sequence
  human ApoB siRNA sequence
tttactgggaggcatgatgctca

SEQ ID NO: 9314 - DNA, 23 bp, Artificial Sequence
  human ApoB siRNA sequence
ttactgggaggcatgatgctcat

SEQ ID NO: 9315 - DNA, 23 bp, Artificial Sequence
  human ApoB siRNA sequence
tactgggaggcatgatgctcatt

SEQ ID NO: 9316 - DNA, 23 bp, Artificial Sequence
  human ApoB siRNA sequence
actgggaggcatgatgctcattt

SEQ ID NO: 9317 - DNA, 23 bp, Artificial Sequence
  human ApoB siRNA sequence
ctgggaggcatgatgctcattta

SEQ ID NO: 9318 - DNA, 23 bp, Artificial Sequence
  human ApoB siRNA sequence
tgggaggcatgatgctcatttaa

SEQ ID NO: 9319 - DNA, 23 bp, Artificial Sequence
  human ApoB siRNA sequence
gggaggcatgatgctcatttaaa

SEQ ID NO: 9320 - DNA, 23 bp, Artificial Sequence
  human ApoB siRNA sequence
ggaggcatgatgctcatttaaat

SEQ ID NO: 9321 - DNA, 23 bp, Artificial Sequence
  human ApoB siRNA sequence
gaggcatgatgctcatttaaatg

SEQ ID NO: 9322 - DNA, 23 bp, Artificial Sequence
  human ApoB siRNA sequence
aggcatgatgctcatttaaatgg

SEQ ID NO: 9323 - DNA, 23 bp, Artificial Sequence
  human ApoB siRNA sequence
ggcatgatgctcatttaaatgga

SEQ ID NO: 9324 - DNA, 23 bp, Artificial Sequence
  human ApoB siRNA sequence
gcatgatgctcatttaaatggaa

SEQ ID NO: 9325 - DNA, 23 bp, Artificial Sequence
  human ApoB siRNA sequence
catgatgctcatttaaatggaaa

SEQ ID NO: 9326 - DNA, 23 bp, Artificial Sequence
  human ApoB siRNA sequence
atgatgctcatttaaatggaaag

SEQ ID NO: 9327 - DNA, 23 bp, Artificial Sequence
  human ApoB siRNA sequence
tgatgctcatttaaatggaaagg

SEQ ID NO: 9328 - DNA, 23 bp, Artificial Sequence
  human ApoB siRNA sequence
gatgctcatttaaatggaaaggt

SEQ ID NO: 9329 - DNA, 23 bp, Artificial Sequence
  human ApoB siRNA sequence
atgctcatttaaatggaaaggtt

SEQ ID NO: 9330 - DNA, 23 bp, Artificial Sequence
  human ApoB siRNA sequence
tgctcatttaaatggaaaggtta

SEQ ID NO: 9331 - DNA, 23 bp, Artificial Sequence
  human ApoB siRNA sequence
gctcatttaaatggaaaggttat

SEQ ID NO: 9332 - DNA, 23 bp, Artificial Sequence
  human ApoB siRNA sequence
ctcatttaaatggaaaggttatt

SEQ ID NO: 9333 - DNA, 23 bp, Artificial Sequence
  human ApoB siRNA sequence
tcatttaaatggaaaggttattg

SEQ ID NO: 9334 - DNA, 23 bp, Artificial Sequence
  human ApoB siRNA sequence
catttaaatggaaaggttattgg

SEQ ID NO: 9335 - DNA, 23 bp, Artificial Sequence
  human ApoB siRNA sequence
atttaaatggaaaggttattgga

SEQ ID NO: 9336 - DNA, 23 bp, Artificial Sequence
  human ApoB siRNA sequence
tttaaatggaaaggttattggaa

SEQ ID NO: 9337 - DNA, 23 bp, Artificial Sequence
  human ApoB siRNA sequence
ttaaatggaaaggttattggaac

SEQ ID NO: 9338 - DNA, 23 bp, Artificial Sequence
  human ApoB siRNA sequence
taaatggaaaggttattggaact

SEQ ID NO: 9339 - DNA, 23 bp, Artificial Sequence
  human ApoB siRNA sequence
aaatggaaaggttattggaactt

SEQ ID NO: 9340 - DNA, 23 bp, Artificial Sequence
  human ApoB siRNA sequence
aatggaaaggttattggaacttt

SEQ ID NO: 9341 - DNA, 23 bp, Artificial Sequence
  human ApoB siRNA sequence
atggaaaggttattggaactttg

SEQ ID NO: 9342 - DNA, 23 bp, Artificial Sequence
  human ApoB siRNA sequence
tggaaaggttattggaactttga

SEQ ID NO: 9343 - DNA, 23 bp, Artificial Sequence
  human ApoB siRNA sequence
ggaaaggttattggaactttgaa

SEQ ID NO: 9344 - DNA, 23 bp, Artificial Sequence
  human ApoB siRNA sequence
gaaaggttattggaactttgaaa

SEQ ID NO: 9345 - DNA, 23 bp, Artificial Sequence
  human ApoB siRNA sequence
aaaggttattggaactttgaaaa

SEQ ID NO: 9346 - DNA, 23 bp, Artificial Sequence
  human ApoB siRNA sequence
aaggttattggaactttgaaaaa

SEQ ID NO: 9347 - DNA, 23 bp, Artificial Sequence
  human ApoB siRNA sequence
aggttattggaactttgaaaaat

SEQ ID NO: 9348 - DNA, 23 bp, Artificial Sequence
  human ApoB siRNA sequence
ggttattggaactttgaaaaatt

SEQ ID NO: 9349 - DNA, 23 bp, Artificial Sequence
  human ApoB siRNA sequence
gttattggaactttgaaaaattc

SEQ ID NO: 9350 - DNA, 23 bp, Artificial Sequence
  human ApoB siRNA sequence
ttattggaactttgaaaaattct

SEQ ID NO: 9351 - DNA, 23 bp, Artificial Sequence
  human ApoB siRNA sequence
tattggaactttgaaaaattctc

SEQ ID NO: 9352 - DNA, 23 bp, Artificial Sequence
  human ApoB siRNA sequence
attggaactttgaaaaattctct

SEQ ID NO: 9353 - DNA, 23 bp, Artificial Sequence
  human ApoB siRNA sequence
ttggaactttgaaaaattctctt

SEQ ID NO: 9354 - DNA, 23 bp, Artificial Sequence
  human ApoB siRNA sequence
tggaactttgaaaaattctcttt

SEQ ID NO: 9355 - DNA, 23 bp, Artificial Sequence
  human ApoB siRNA sequence
ggaactttgaaaaattctctttt

SEQ ID NO: 9356 - DNA, 23 bp, Artificial Sequence
  human ApoB siRNA sequence
gaactttgaaaaattctcttttc

SEQ ID NO: 9357 - DNA, 23 bp, Artificial Sequence
  human ApoB siRNA sequence
aactttgaaaaattctcttttct

SEQ ID NO: 9358 - DNA, 23 bp, Artificial Sequence
  human ApoB siRNA sequence
actttgaaaaattctcttttctt

SEQ ID NO: 9359 - DNA, 23 bp, Artificial Sequence
  human ApoB siRNA sequence
ctttgaaaaattctcttttcttt

SEQ ID NO: 9360 - DNA, 23 bp, Artificial Sequence
  human ApoB siRNA sequence
tttgaaaaattctcttttctttt

SEQ ID NO: 9361 - DNA, 23 bp, Artificial Sequence
  human ApoB siRNA sequence
ttgaaaaattctcttttcttttc

SEQ ID NO: 9362 - DNA, 23 bp, Artificial Sequence
  human ApoB siRNA sequence
tgaaaaattctcttttcttttca

SEQ ID NO: 9363 - DNA, 23 bp, Artificial Sequence
  human ApoB siRNA sequence
gaaaaattctcttttcttttcag

SEQ ID NO: 9364 - DNA, 23 bp, Artificial Sequence
  human ApoB siRNA sequence
aaaaattctcttttcttttcagc

SEQ ID NO: 9365 - DNA, 23 bp, Artificial Sequence
  human ApoB siRNA sequence
aaaattctcttttcttttcagcc

SEQ ID NO: 9366 - DNA, 23 bp, Artificial Sequence
  human ApoB siRNA sequence
aaattctcttttcttttcagccc

SEQ ID NO: 9367 - DNA, 23 bp, Artificial Sequence
  human ApoB siRNA sequence
aattctcttttcttttcagccca

SEQ ID NO: 9368 - DNA, 23 bp, Artificial Sequence
  human ApoB siRNA sequence
attctcttttcttttcagcccag

SEQ ID NO: 9369 - DNA, 23 bp, Artificial Sequence
  human ApoB siRNA sequence
ttctcttttcttttcagcccagc

SEQ ID NO: 9370 - DNA, 23 bp, Artificial Sequence
  human ApoB siRNA sequence
tctcttttcttttcagcccagcc

SEQ ID NO: 9371 - DNA, 23 bp, Artificial Sequence
  human ApoB siRNA sequence
ctcttttcttttcagcccagcca

SEQ ID NO: 9372 - DNA, 23 bp, Artificial Sequence
  human ApoB siRNA sequence
tcttttcttttcagcccagccat

SEQ ID NO: 9373 - DNA, 23 bp, Artificial Sequence
  human ApoB siRNA sequence
cttttcttttcagcccagccatt

SEQ ID NO: 9374 - DNA, 23 bp, Artificial Sequence
  human ApoB siRNA sequence
ttttcttttcagcccagccattt

SEQ ID NO: 9375 - DNA, 23 bp, Artificial Sequence
  human ApoB siRNA sequence
tttcttttcagcccagccatttg

SEQ ID NO: 9376 - DNA, 23 bp, Artificial Sequence
  human ApoB siRNA sequence
ttcttttcagcccagccatttga

SEQ ID NO: 9377 - DNA, 23 bp, Artificial Sequence
  human ApoB siRNA sequence
tcttttcagcccagccatttgag

SEQ ID NO: 9378 - DNA, 23 bp, Artificial Sequence
  human ApoB siRNA sequence
cttttcagcccagccatttgaga

SEQ ID NO: 9379 - DNA, 23 bp, Artificial Sequence
  human ApoB siRNA sequence
ttttcagcccagccatttgagat

SEQ ID NO: 9380 - DNA, 23 bp, Artificial Sequence
  human ApoB siRNA sequence
tttcagcccagccatttgagatc

SEQ ID NO: 9381 - DNA, 23 bp, Artificial Sequence
  human ApoB siRNA sequence
ttcagcccagccatttgagatca

SEQ ID NO: 9382 - DNA, 23 bp, Artificial Sequence
  human ApoB siRNA sequence
tcagcccagccatttgagatcac

SEQ ID NO: 9383 - DNA, 23 bp, Artificial Sequence
  human ApoB siRNA sequence
cagcccagccatttgagatcacg

SEQ ID NO: 9384 - DNA, 23 bp, Artificial Sequence
  human ApoB siRNA sequence
agcccagccatttgagatcacgg

SEQ ID NO: 9385 - DNA, 23 bp, Artificial Sequence
  human ApoB siRNA sequence
gcccagccatttgagatcacggc

SEQ ID NO: 9386 - DNA, 23 bp, Artificial Sequence
  human ApoB siRNA sequence
cccagccatttgagatcacggca

SEQ ID NO: 9387 - DNA, 23 bp, Artificial Sequence
  human ApoB siRNA sequence
ccagccatttgagatcacggcat

SEQ ID NO: 9388 - DNA, 23 bp, Artificial Sequence
  human ApoB siRNA sequence
cagccatttgagatcacggcatc

SEQ ID NO: 9389 - DNA, 23 bp, Artificial Sequence
  human ApoB siRNA sequence
agccatttgagatcacggcatcc

SEQ ID NO: 9390 - DNA, 23 bp, Artificial Sequence
  human ApoB siRNA sequence
gccatttgagatcacggcatcca

SEQ ID NO: 9391 - DNA, 23 bp, Artificial Sequence
  human ApoB siRNA sequence
ccatttgagatcacggcatccac

SEQ ID NO: 9392 - DNA, 23 bp, Artificial Sequence
  human ApoB siRNA sequence
catttgagatcacggcatccaca

SEQ ID NO: 9393 - DNA, 23 bp, Artificial Sequence
  human ApoB siRNA sequence
atttgagatcacggcatccacaa

SEQ ID NO: 9394 - DNA, 23 bp, Artificial Sequence
  human ApoB siRNA sequence
tttgagatcacggcatccacaaa

SEQ ID NO: 9395 - DNA, 23 bp, Artificial Sequence
  human ApoB siRNA sequence
ttgagatcacggcatccacaaac

SEQ ID NO: 9396 - DNA, 23 bp, Artificial Sequence
  human ApoB siRNA sequence
tgagatcacggcatccacaaaca

SEQ ID NO: 9397 - DNA, 23 bp, Artificial Sequence
  human ApoB siRNA sequence
gagatcacggcatccacaaacaa

SEQ ID NO: 9398 - DNA, 23 bp, Artificial Sequence
  human ApoB siRNA sequence
agatcacggcatccacaaacaat

SEQ ID NO: 9399 - DNA, 23 bp, Artificial Sequence
  human ApoB siRNA sequence
gatcacggcatccacaaacaatg

SEQ ID NO: 9400 - DNA, 23 bp, Artificial Sequence
  human ApoB siRNA sequence
atcacggcatccacaaacaatga

SEQ ID NO: 9401 - DNA, 23 bp, Artificial Sequence
  human ApoB siRNA sequence
tcacggcatccacaaacaatgaa

SEQ ID NO: 9402 - DNA, 23 bp, Artificial Sequence
  human ApoB siRNA sequence
cacggcatccacaaacaatgaag

SEQ ID NO: 9403 - DNA, 23 bp, Artificial Sequence
  human ApoB siRNA sequence
acggcatccacaaacaatgaagg

SEQ ID NO: 9404 - DNA, 23 bp, Artificial Sequence
  human ApoB siRNA sequence
cggcatccacaaacaatgaaggg

SEQ ID NO: 9405 - DNA, 23 bp, Artificial Sequence
  human ApoB siRNA sequence
ggcatccacaaacaatgaaggga

SEQ ID NO: 9406 - DNA, 23 bp, Artificial Sequence
  human ApoB siRNA sequence
gcatccacaaacaatgaagggaa

SEQ ID NO: 9407 - DNA, 23 bp, Artificial Sequence
  human ApoB siRNA sequence
catccacaaacaatgaagggaat

SEQ ID NO: 9408 - DNA, 23 bp, Artificial Sequence
  human ApoB siRNA sequence
atccacaaacaatgaagggaatt

SEQ ID NO: 9409 - DNA, 23 bp, Artificial Sequence
  human ApoB siRNA sequence
tccacaaacaatgaagggaattt

SEQ ID NO: 9410 - DNA, 23 bp, Artificial Sequence
  human ApoB siRNA sequence
ccacaaacaatgaagggaatttg

SEQ ID NO: 9411 - DNA, 23 bp, Artificial Sequence
  human ApoB siRNA sequence
cacaaacaatgaagggaatttga

SEQ ID NO: 9412 - DNA, 23 bp, Artificial Sequence
  human ApoB siRNA sequence
acaaacaatgaagggaatttgaa

SEQ ID NO: 9413 - DNA, 23 bp, Artificial Sequence
  human ApoB siRNA sequence
caaacaatgaagggaatttgaaa

SEQ ID NO: 9414 - DNA, 23 bp, Artificial Sequence
  human ApoB siRNA sequence
aaacaatgaagggaatttgaaag

SEQ ID NO: 9415 - DNA, 23 bp, Artificial Sequence
  human ApoB siRNA sequence
aacaatgaagggaatttgaaagt

SEQ ID NO: 9416 - DNA, 23 bp, Artificial Sequence
  human ApoB siRNA sequence
acaatgaagggaatttgaaagtt

SEQ ID NO: 9417 - DNA, 23 bp, Artificial Sequence
  human ApoB siRNA sequence
caatgaagggaatttgaaagttc

SEQ ID NO: 9418 - DNA, 23 bp, Artificial Sequence
  human ApoB siRNA sequence
aatgaagggaatttgaaagttcg

SEQ ID NO: 9419 - DNA, 23 bp, Artificial Sequence
  human ApoB siRNA sequence
atgaagggaatttgaaagttcgt

SEQ ID NO: 9420 - DNA, 23 bp, Artificial Sequence
  human ApoB siRNA sequence
tgaagggaatttgaaagttcgtt

SEQ ID NO: 9421 - DNA, 23 bp, Artificial Sequence
  human ApoB siRNA sequence
gaagggaatttgaaagttcgttt

SEQ ID NO: 9422 - DNA, 23 bp, Artificial Sequence
  human ApoB siRNA sequence
aagggaatttgaaagttcgtttt

SEQ ID NO: 9423 - DNA, 23 bp, Artificial Sequence
  human ApoB siRNA sequence
agggaatttgaaagttcgttttc

SEQ ID NO: 9424 - DNA, 23 bp, Artificial Sequence
  human ApoB siRNA sequence
gggaatttgaaagttcgttttcc

SEQ ID NO: 9425 - DNA, 23 bp, Artificial Sequence
  human ApoB siRNA sequence
ggaatttgaaagttcgttttcca

SEQ ID NO: 9426 - DNA, 23 bp, Artificial Sequence
  human ApoB siRNA sequence
gaatttgaaagttcgttttccat

SEQ ID NO: 9427 - DNA, 23 bp, Artificial Sequence
  human ApoB siRNA sequence
aatttgaaagttcgttttccatt

SEQ ID NO: 9428 - DNA, 23 bp, Artificial Sequence
  human ApoB siRNA sequence
atttgaaagttcgttttccatta

SEQ ID NO: 9429 - DNA, 23 bp, Artificial Sequence
  human ApoB siRNA sequence
tttgaaagttcgttttccattaa

SEQ ID NO: 9430 - DNA, 23 bp, Artificial Sequence
  human ApoB siRNA sequence
ttgaaagttcgttttccattaag

SEQ ID NO: 9431 - DNA, 23 bp, Artificial Sequence
  human ApoB siRNA sequence
tgaaagttcgttttccattaagg

SEQ ID NO: 9432 - DNA, 23 bp, Artificial Sequence
  human ApoB siRNA sequence
gaaagttcgttttccattaaggt

SEQ ID NO: 9433 - DNA, 23 bp, Artificial Sequence
  human ApoB siRNA sequence
aaagttcgttttccattaaggtt

SEQ ID NO: 9434 - DNA, 23 bp, Artificial Sequence
  human ApoB siRNA sequence
aagttcgttttccattaaggtta

SEQ ID NO: 9435 - DNA, 23 bp, Artificial Sequence
  human ApoB siRNA sequence
agttcgttttccattaaggttaa

SEQ ID NO: 9436 - DNA, 23 bp, Artificial Sequence
  human ApoB siRNA sequence
gttcgttttccattaaggttaac

SEQ ID NO: 9437 - DNA, 23 bp, Artificial Sequence
  human ApoB siRNA sequence
ttcgttttccattaaggttaaca

SEQ ID NO: 9438 - DNA, 23 bp, Artificial Sequence
  human ApoB siRNA sequence
tcgttttccattaaggttaacag

SEQ ID NO: 9439 - DNA, 23 bp, Artificial Sequence
  human ApoB siRNA sequence
cgttttccattaaggttaacagg

SEQ ID NO: 9440 - DNA, 23 bp, Artificial Sequence
  human ApoB siRNA sequence
gttttccattaaggttaacaggg

SEQ ID NO: 9441 - DNA, 23 bp, Artificial Sequence
  human ApoB siRNA sequence
ttttccattaaggttaacaggga

SEQ ID NO: 9442 - DNA, 23 bp, Artificial Sequence
  human ApoB siRNA sequence
tttccattaaggttaacagggaa

SEQ ID NO: 9443 - DNA, 23 bp, Artificial Sequence
  human ApoB siRNA sequence
ttccattaaggttaacagggaag

SEQ ID NO: 9444 - DNA, 23 bp, Artificial Sequence
  human ApoB siRNA sequence
tccattaaggttaacagggaaga

SEQ ID NO: 9445 - DNA, 23 bp, Artificial Sequence
  human ApoB siRNA sequence
ccattaaggttaacagggaagat

SEQ ID NO: 9446 - DNA, 23 bp, Artificial Sequence
  human ApoB siRNA sequence
cattaaggttaacagggaagata

SEQ ID NO: 9447 - DNA, 23 bp, Artificial Sequence
  human ApoB siRNA sequence
attaaggttaacagggaagatag

SEQ ID NO: 9448 - DNA, 23 bp, Artificial Sequence
  human ApoB siRNA sequence
ttaaggttaacagggaagataga

SEQ ID NO: 9449 - DNA, 23 bp, Artificial Sequence
  human ApoB siRNA sequence
taaggttaacagggaagatagac

SEQ ID NO: 9450 - DNA, 23 bp, Artificial Sequence
  human ApoB siRNA sequence
aaggttaacagggaagatagact

SEQ ID NO: 9451 - DNA, 23 bp, Artificial Sequence
  human ApoB siRNA sequence
aggttaacagggaagatagactt

SEQ ID NO: 9452 - DNA, 23 bp, Artificial Sequence
  human ApoB siRNA sequence
ggttaacagggaagatagacttc

SEQ ID NO: 9453 - DNA, 23 bp, Artificial Sequence
  human ApoB siRNA sequence
gttaacagggaagatagacttcc

SEQ ID NO: 9454 - DNA, 23 bp, Artificial Sequence
  human ApoB siRNA sequence
ttaacagggaagatagacttcct

SEQ ID NO: 9455 - DNA, 23 bp, Artificial Sequence
  human ApoB siRNA sequence
taacagggaagatagacttcctg

SEQ ID NO: 9456 - DNA, 23 bp, Artificial Sequence
  human ApoB siRNA sequence
aacagggaagatagacttcctga

SEQ ID NO: 9457 - DNA, 23 bp, Artificial Sequence
  human ApoB siRNA sequence
acagggaagatagacttcctgaa

SEQ ID NO: 9458 - DNA, 23 bp, Artificial Sequence
  human ApoB siRNA sequence
cagggaagatagacttcctgaat

SEQ ID NO: 9459 - DNA, 23 bp, Artificial Sequence
  human ApoB siRNA sequence
agggaagatagacttcctgaata

SEQ ID NO: 9460 - DNA, 23 bp, Artificial Sequence
  human ApoB siRNA sequence
gggaagatagacttcctgaataa

SEQ ID NO: 9461 - DNA, 23 bp, Artificial Sequence
  human ApoB siRNA sequence
ggaagatagacttcctgaataac

SEQ ID NO: 9462 - DNA, 23 bp, Artificial Sequence
  human ApoB siRNA sequence
gaagatagacttcctgaataact

SEQ ID NO: 9463 - DNA, 23 bp, Artificial Sequence
  human ApoB siRNA sequence
aagatagacttcctgaataacta

SEQ ID NO: 9464 - DNA, 23 bp, Artificial Sequence
  human ApoB siRNA sequence
agatagacttcctgaataactat

SEQ ID NO: 9465 - DNA, 23 bp, Artificial Sequence
  human ApoB siRNA sequence
gatagacttcctgaataactatg

SEQ ID NO: 9466 - DNA, 23 bp, Artificial Sequence
  human ApoB siRNA sequence
atagacttcctgaataactatgc

SEQ ID NO: 9467 - DNA, 23 bp, Artificial Sequence
  human ApoB siRNA sequence
tagacttcctgaataactatgca

SEQ ID NO: 9468 - DNA, 23 bp, Artificial Sequence
  human ApoB siRNA sequence
agacttcctgaataactatgcac

SEQ ID NO: 9469 - DNA, 23 bp, Artificial Sequence
  human ApoB siRNA sequence
gacttcctgaataactatgcact

SEQ ID NO: 9470 - DNA, 23 bp, Artificial Sequence
  human ApoB siRNA sequence
acttcctgaataactatgcactg

SEQ ID NO: 9471 - DNA, 23 bp, Artificial Sequence
  human ApoB siRNA sequence
cttcctgaataactatgcactgt

SEQ ID NO: 9472 - DNA, 23 bp, Artificial Sequence
  human ApoB siRNA sequence
ttcctgaataactatgcactgtt

SEQ ID NO: 9473 - DNA, 23 bp, Artificial Sequence
  human ApoB siRNA sequence
tcctgaataactatgcactgttt

SEQ ID NO: 9474 - DNA, 23 bp, Artificial Sequence
  human ApoB siRNA sequence
cctgaataactatgcactgtttc

SEQ ID NO: 9475 - DNA, 23 bp, Artificial Sequence
  human ApoB siRNA sequence
ctgaataactatgcactgtttct

SEQ ID NO: 9476 - DNA, 23 bp, Artificial Sequence
  human ApoB siRNA sequence
tgaataactatgcactgtttctg

SEQ ID NO: 9477 - DNA, 23 bp, Artificial Sequence
  human ApoB siRNA sequence
gaataactatgcactgtttctga

SEQ ID NO: 9478 - DNA, 23 bp, Artificial Sequence
  human ApoB siRNA sequence
aataactatgcactgtttctgag

SEQ ID NO: 9479 - DNA, 23 bp, Artificial Sequence
  human ApoB siRNA sequence
ataactatgcactgtttctgagt

SEQ ID NO: 9480 - DNA, 23 bp, Artificial Sequence
  human ApoB siRNA sequence
taactatgcactgtttctgagtc

SEQ ID NO: 9481 - DNA, 23 bp, Artificial Sequence
  human ApoB siRNA sequence
aactatgcactgtttctgagtcc

SEQ ID NO: 9482 - DNA, 23 bp, Artificial Sequence
  human ApoB siRNA sequence
actatgcactgtttctgagtccc

SEQ ID NO: 9483 - DNA, 23 bp, Artificial Sequence
  human ApoB siRNA sequence
ctatgcactgtttctgagtccca

SEQ ID NO: 9484 - DNA, 23 bp, Artificial Sequence
  human ApoB siRNA sequence
tatgcactgtttctgagtcccag

SEQ ID NO: 9485 - DNA, 23 bp, Artificial Sequence
  human ApoB siRNA sequence
atgcactgtttctgagtcccagt

SEQ ID NO: 9486 - DNA, 23 bp, Artificial Sequence
  human ApoB siRNA sequence
tgcactgtttctgagtcccagtg

SEQ ID NO: 9487 - DNA, 23 bp, Artificial Sequence
  human ApoB siRNA sequence
gcactgtttctgagtcccagtgc

SEQ ID NO: 9488 - DNA, 23 bp, Artificial Sequence
  human ApoB siRNA sequence
cactgtttctgagtcccagtgcc

SEQ ID NO: 9489 - DNA, 23 bp, Artificial Sequence
  human ApoB siRNA sequence
actgtttctgagtcccagtgccc

SEQ ID NO: 9490 - DNA, 23 bp, Artificial Sequence
  human ApoB siRNA sequence
ctgtttctgagtcccagtgccca

SEQ ID NO: 9491 - DNA, 23 bp, Artificial Sequence
  human ApoB siRNA sequence
tgtttctgagtcccagtgcccag

SEQ ID NO: 9492 - DNA, 23 bp, Artificial Sequence
  human ApoB siRNA sequence
gtttctgagtcccagtgcccagc

SEQ ID NO: 9493 - DNA, 23 bp, Artificial Sequence
  human ApoB siRNA sequence
tttctgagtcccagtgcccagca

SEQ ID NO: 9494 - DNA, 23 bp, Artificial Sequence
  human ApoB siRNA sequence
ttctgagtcccagtgcccagcaa

SEQ ID NO: 9495 - DNA, 23 bp, Artificial Sequence
  human ApoB siRNA sequence
tctgagtcccagtgcccagcaag

SEQ ID NO: 9496 - DNA, 23 bp, Artificial Sequence
  human ApoB siRNA sequence
ctgagtcccagtgcccagcaagc

SEQ ID NO: 9497 - DNA, 23 bp, Artificial Sequence
  human ApoB siRNA sequence
tgagtcccagtgcccagcaagca

SEQ ID NO: 9498 - DNA, 23 bp, Artificial Sequence
  human ApoB siRNA sequence
gagtcccagtgcccagcaagcaa

SEQ ID NO: 9499 - DNA, 23 bp, Artificial Sequence
  human ApoB siRNA sequence
agtcccagtgcccagcaagcaag

SEQ ID NO: 9500 - DNA, 23 bp, Artificial Sequence
  human ApoB siRNA sequence
gtcccagtgcccagcaagcaagt

SEQ ID NO: 9501 - DNA, 23 bp, Artificial Sequence
  human ApoB siRNA sequence
tcccagtgcccagcaagcaagtt

SEQ ID NO: 9502 - DNA, 23 bp, Artificial Sequence
  human ApoB siRNA sequence
cccagtgcccagcaagcaagttg

SEQ ID NO: 9503 - DNA, 23 bp, Artificial Sequence
  human ApoB siRNA sequence
ccagtgcccagcaagcaagttgg

SEQ ID NO: 9504 - DNA, 23 bp, Artificial Sequence
  human ApoB siRNA sequence
cagtgcccagcaagcaagttggc

SEQ ID NO: 9505 - DNA, 23 bp, Artificial Sequence
  human ApoB siRNA sequence
agtgcccagcaagcaagttggca

SEQ ID NO: 9506 - DNA, 23 bp, Artificial Sequence
  human ApoB siRNA sequence
gtgcccagcaagcaagttggcaa

SEQ ID NO: 9507 - DNA, 23 bp, Artificial Sequence
  human ApoB siRNA sequence
tgcccagcaagcaagttggcaag

SEQ ID NO: 9508 - DNA, 23 bp, Artificial Sequence
  human ApoB siRNA sequence
gcccagcaagcaagttggcaagt

SEQ ID NO: 9509 - DNA, 23 bp, Artificial Sequence
  human ApoB siRNA sequence
cccagcaagcaagttggcaagta

SEQ ID NO: 9510 - DNA, 23 bp, Artificial Sequence
  human ApoB siRNA sequence
ccagcaagcaagttggcaagtaa

SEQ ID NO: 9511 - DNA, 23 bp, Artificial Sequence
  human ApoB siRNA sequence
cagcaagcaagttggcaagtaag

SEQ ID NO: 9512 - DNA, 23 bp, Artificial Sequence
  human ApoB siRNA sequence
agcaagcaagttggcaagtaagt

SEQ ID NO: 9513 - DNA, 23 bp, Artificial Sequence
  human ApoB siRNA sequence
gcaagcaagttggcaagtaagtg

SEQ ID NO: 9514 - DNA, 23 bp, Artificial Sequence
  human ApoB siRNA sequence
caagcaagttggcaagtaagtgc

SEQ ID NO: 9515 - DNA, 23 bp, Artificial Sequence
  human ApoB siRNA sequence
aagcaagttggcaagtaagtgct

SEQ ID NO: 9516 - DNA, 23 bp, Artificial Sequence
  human ApoB siRNA sequence
agcaagttggcaagtaagtgcta

SEQ ID NO: 9517 - DNA, 23 bp, Artificial Sequence
  human ApoB siRNA sequence
gcaagttggcaagtaagtgctag

SEQ ID NO: 9518 - DNA, 23 bp, Artificial Sequence
  human ApoB siRNA sequence
caagttggcaagtaagtgctagg

SEQ ID NO: 9519 - DNA, 23 bp, Artificial Sequence
  human ApoB siRNA sequence
aagttggcaagtaagtgctaggt

SEQ ID NO: 9520 - DNA, 23 bp, Artificial Sequence
  human ApoB siRNA sequence
agttggcaagtaagtgctaggtt

SEQ ID NO: 9521 - DNA, 23 bp, Artificial Sequence
  human ApoB siRNA sequence
gttggcaagtaagtgctaggttc

SEQ ID NO: 9522 - DNA, 23 bp, Artificial Sequence
  human ApoB siRNA sequence
ttggcaagtaagtgctaggttca

SEQ ID NO: 9523 - DNA, 23 bp, Artificial Sequence
  human ApoB siRNA sequence
tggcaagtaagtgctaggttcaa

SEQ ID NO: 9524 - DNA, 23 bp, Artificial Sequence
  human ApoB siRNA sequence
ggcaagtaagtgctaggttcaat

SEQ ID NO: 9525 - DNA, 23 bp, Artificial Sequence
  human ApoB siRNA sequence
gcaagtaagtgctaggttcaatc

SEQ ID NO: 9526 - DNA, 23 bp, Artificial Sequence
  human ApoB siRNA sequence
caagtaagtgctaggttcaatca

SEQ ID NO: 9527 - DNA, 23 bp, Artificial Sequence
  human ApoB siRNA sequence
aagtaagtgctaggttcaatcag

SEQ ID NO: 9528 - DNA, 23 bp, Artificial Sequence
  human ApoB siRNA sequence
agtaagtgctaggttcaatcagt

SEQ ID NO: 9529 - DNA, 23 bp, Artificial Sequence
  human ApoB siRNA sequence
gtaagtgctaggttcaatcagta

SEQ ID NO: 9530 - DNA, 23 bp, Artificial Sequence
  human ApoB siRNA sequence
taagtgctaggttcaatcagtat

SEQ ID NO: 9531 - DNA, 23 bp, Artificial Sequence
  human ApoB siRNA sequence
aagtgctaggttcaatcagtata

SEQ ID NO: 9532 - DNA, 23 bp, Artificial Sequence
  human ApoB siRNA sequence
agtgctaggttcaatcagtataa

SEQ ID NO: 9533 - DNA, 23 bp, Artificial Sequence
  human ApoB siRNA sequence
gtgctaggttcaatcagtataag

SEQ ID NO: 9534 - DNA, 23 bp, Artificial Sequence
  human ApoB siRNA sequence
tgctaggttcaatcagtataagt

SEQ ID NO: 9535 - DNA, 23 bp, Artificial Sequence
  human ApoB siRNA sequence
gctaggttcaatcagtataagta

SEQ ID NO: 9536 - DNA, 23 bp, Artificial Sequence
  human ApoB siRNA sequence
ctaggttcaatcagtataagtac

SEQ ID NO: 9537 - DNA, 23 bp, Artificial Sequence
  human ApoB siRNA sequence
taggttcaatcagtataagtaca

SEQ ID NO: 9538 - DNA, 23 bp, Artificial Sequence
  human ApoB siRNA sequence
aggttcaatcagtataagtacaa

SEQ ID NO: 9539 - DNA, 23 bp, Artificial Sequence
  human ApoB siRNA sequence
ggttcaatcagtataagtacaac

SEQ ID NO: 9540 - DNA, 23 bp, Artificial Sequence
  human ApoB siRNA sequence
gttcaatcagtataagtacaacc

SEQ ID NO: 9541 - DNA, 23 bp, Artificial Sequence
  human ApoB siRNA sequence
ttcaatcagtataagtacaacca

SEQ ID NO: 9542 - DNA, 23 bp, Artificial Sequence
  human ApoB siRNA sequence
tcaatcagtataagtacaaccaa

SEQ ID NO: 9543 - DNA, 23 bp, Artificial Sequence
  human ApoB siRNA sequence
caatcagtataagtacaaccaaa

SEQ ID NO: 9544 - DNA, 23 bp, Artificial Sequence
  human ApoB siRNA sequence
aatcagtataagtacaaccaaaa

SEQ ID NO: 9545 - DNA, 23 bp, Artificial Sequence
  human ApoB siRNA sequence
atcagtataagtacaaccaaaat

SEQ ID NO: 9546 - DNA, 23 bp, Artificial Sequence
  human ApoB siRNA sequence
tcagtataagtacaaccaaaatt

SEQ ID NO: 9547 - DNA, 23 bp, Artificial Sequence
  human ApoB siRNA sequence
cagtataagtacaaccaaaattt

SEQ ID NO: 9548 - DNA, 23 bp, Artificial Sequence
  human ApoB siRNA sequence
agtataagtacaaccaaaatttc

SEQ ID NO: 9549 - DNA, 23 bp, Artificial Sequence
  human ApoB siRNA sequence
gtataagtacaaccaaaatttct

SEQ ID NO: 9550 - DNA, 23 bp, Artificial Sequence
  human ApoB siRNA sequence
tataagtacaaccaaaatttctc

SEQ ID NO: 9551 - DNA, 23 bp, Artificial Sequence
  human ApoB siRNA sequence
ataagtacaaccaaaatttctct

SEQ ID NO: 9552 - DNA, 23 bp, Artificial Sequence
  human ApoB siRNA sequence
taagtacaaccaaaatttctctg

SEQ ID NO: 9553 - DNA, 23 bp, Artificial Sequence
  human ApoB siRNA sequence
aagtacaaccaaaatttctctgc

SEQ ID NO: 9554 - DNA, 23 bp, Artificial Sequence
  human ApoB siRNA sequence
agtacaaccaaaatttctctgct

SEQ ID NO: 9555 - DNA, 23 bp, Artificial Sequence
  human ApoB siRNA sequence
gtacaaccaaaatttctctgctg

SEQ ID NO: 9556 - DNA, 23 bp, Artificial Sequence
  human ApoB siRNA sequence
tacaaccaaaatttctctgctgg

SEQ ID NO: 9557 - DNA, 23 bp, Artificial Sequence
  human ApoB siRNA sequence
acaaccaaaatttctctgctgga

SEQ ID NO: 9558 - DNA, 23 bp, Artificial Sequence
  human ApoB siRNA sequence
caaccaaaatttctctgctggaa

SEQ ID NO: 9559 - DNA, 23 bp, Artificial Sequence
  human ApoB siRNA sequence
aaccaaaatttctctgctggaaa

SEQ ID NO: 9560 - DNA, 23 bp, Artificial Sequence
  human ApoB siRNA sequence
accaaaatttctctgctggaaac

SEQ ID NO: 9561 - DNA, 23 bp, Artificial Sequence
  human ApoB siRNA sequence
ccaaaatttctctgctggaaaca

SEQ ID NO: 9562 - DNA, 23 bp, Artificial Sequence
  human ApoB siRNA sequence
caaaatttctctgctggaaacaa

SEQ ID NO: 9563 - DNA, 23 bp, Artificial Sequence
  human ApoB siRNA sequence
aaaatttctctgctggaaacaac

SEQ ID NO: 9564 - DNA, 23 bp, Artificial Sequence
  human ApoB siRNA sequence
aaatttctctgctggaaacaacg

SEQ ID NO: 9565 - DNA, 23 bp, Artificial Sequence
  human ApoB siRNA sequence
aatttctctgctggaaacaacga

SEQ ID NO: 9566 - DNA, 23 bp, Artificial Sequence
  human ApoB siRNA sequence
atttctctgctggaaacaacgag

SEQ ID NO: 9567 - DNA, 23 bp, Artificial Sequence
  human ApoB siRNA sequence
tttctctgctggaaacaacgaga

SEQ ID NO: 9568 - DNA, 23 bp, Artificial Sequence
  human ApoB siRNA sequence
ttctctgctggaaacaacgagaa

SEQ ID NO: 9569 - DNA, 23 bp, Artificial Sequence
  human ApoB siRNA sequence
tctctgctggaaacaacgagaac

SEQ ID NO: 9570 - DNA, 23 bp, Artificial Sequence
  human ApoB siRNA sequence
ctctgctggaaacaacgagaaca

SEQ ID NO: 9571 - DNA, 23 bp, Artificial Sequence
  human ApoB siRNA sequence
tctgctggaaacaacgagaacat

SEQ ID NO: 9572 - DNA, 23 bp, Artificial Sequence
  human ApoB siRNA sequence
ctgctggaaacaacgagaacatt

SEQ ID NO: 9573 - DNA, 23 bp, Artificial Sequence
  human ApoB siRNA sequence
tgctggaaacaacgagaacatta

SEQ ID NO: 9574 - DNA, 23 bp, Artificial Sequence
  human ApoB siRNA sequence
gctggaaacaacgagaacattat

SEQ ID NO: 9575 - DNA, 23 bp, Artificial Sequence
  human ApoB siRNA sequence
ctggaaacaacgagaacattatg

SEQ ID NO: 9576 - DNA, 23 bp, Artificial Sequence
  human ApoB siRNA sequence
tggaaacaacgagaacattatgg

SEQ ID NO: 9577 - DNA, 23 bp, Artificial Sequence
  human ApoB siRNA sequence
ggaaacaacgagaacattatgga

SEQ ID NO: 9578 - DNA, 23 bp, Artificial Sequence
  human ApoB siRNA sequence
gaaacaacgagaacattatggag

SEQ ID NO: 9579 - DNA, 23 bp, Artificial Sequence
  human ApoB siRNA sequence
aaacaacgagaacattatggagg

SEQ ID NO: 9580 - DNA, 23 bp, Artificial Sequence
  human ApoB siRNA sequence
aacaacgagaacattatggaggc

SEQ ID NO: 9581 - DNA, 23 bp, Artificial Sequence
  human ApoB siRNA sequence
acaacgagaacattatggaggcc

SEQ ID NO: 9582 - DNA, 23 bp, Artificial Sequence
  human ApoB siRNA sequence
caacgagaacattatggaggccc

SEQ ID NO: 9583 - DNA, 23 bp, Artificial Sequence
  human ApoB siRNA sequence
aacgagaacattatggaggccca

SEQ ID NO: 9584 - DNA, 23 bp, Artificial Sequence
  human ApoB siRNA sequence
acgagaacattatggaggcccat

SEQ ID NO: 9585 - DNA, 23 bp, Artificial Sequence
  human ApoB siRNA sequence
cgagaacattatggaggcccatg

SEQ ID NO: 9586 - DNA, 23 bp, Artificial Sequence
  human ApoB siRNA sequence
gagaacattatggaggcccatgt

SEQ ID NO: 9587 - DNA, 23 bp, Artificial Sequence
  human ApoB siRNA sequence
agaacattatggaggcccatgta

SEQ ID NO: 9588 - DNA, 23 bp, Artificial Sequence
  human ApoB siRNA sequence
gaacattatggaggcccatgtag

SEQ ID NO: 9589 - DNA, 23 bp, Artificial Sequence
  human ApoB siRNA sequence
aacattatggaggcccatgtagg

SEQ ID NO: 9590 - DNA, 23 bp, Artificial Sequence
  human ApoB siRNA sequence
acattatggaggcccatgtagga

SEQ ID NO: 9591 - DNA, 23 bp, Artificial Sequence
  human ApoB siRNA sequence
cattatggaggcccatgtaggaa

SEQ ID NO: 9592 - DNA, 23 bp, Artificial Sequence
  human ApoB siRNA sequence
attatggaggcccatgtaggaat

SEQ ID NO: 9593 - DNA, 23 bp, Artificial Sequence
  human ApoB siRNA sequence
ttatggaggcccatgtaggaata

SEQ ID NO: 9594 - DNA, 23 bp, Artificial Sequence
  human ApoB siRNA sequence
tatggaggcccatgtaggaataa

SEQ ID NO: 9595 - DNA, 23 bp, Artificial Sequence
  human ApoB siRNA sequence
atggaggcccatgtaggaataaa

SEQ ID NO: 9596 - DNA, 23 bp, Artificial Sequence
  human ApoB siRNA sequence
tggaggcccatgtaggaataaat

SEQ ID NO: 9597 - DNA, 23 bp, Artificial Sequence
  human ApoB siRNA sequence
ggaggcccatgtaggaataaatg

SEQ ID NO: 9598 - DNA, 23 bp, Artificial Sequence
  human ApoB siRNA sequence
gaggcccatgtaggaataaatgg

SEQ ID NO: 9599 - DNA, 23 bp, Artificial Sequence
  human ApoB siRNA sequence
aggcccatgtaggaataaatgga

SEQ ID NO: 9600 - DNA, 23 bp, Artificial Sequence
  human ApoB siRNA sequence
ggcccatgtaggaataaatggag

SEQ ID NO: 9601 - DNA, 23 bp, Artificial Sequence
  human ApoB siRNA sequence
gcccatgtaggaataaatggaga

SEQ ID NO: 9602 - DNA, 23 bp, Artificial Sequence
  human ApoB siRNA sequence
cccatgtaggaataaatggagaa

SEQ ID NO: 9603 - DNA, 23 bp, Artificial Sequence
  human ApoB siRNA sequence
ccatgtaggaataaatggagaag

SEQ ID NO: 9604 - DNA, 23 bp, Artificial Sequence
  human ApoB siRNA sequence
catgtaggaataaatggagaagc

SEQ ID NO: 9605 - DNA, 23 bp, Artificial Sequence
  human ApoB siRNA sequence
atgtaggaataaatggagaagca

SEQ ID NO: 9606 - DNA, 23 bp, Artificial Sequence
  human ApoB siRNA sequence
tgtaggaataaatggagaagcaa

SEQ ID NO: 9607 - DNA, 23 bp, Artificial Sequence
  human ApoB siRNA sequence
gtaggaataaatggagaagcaaa

SEQ ID NO: 9608 - DNA, 23 bp, Artificial Sequence
  human ApoB siRNA sequence
taggaataaatggagaagcaaat

SEQ ID NO: 9609 - DNA, 23 bp, Artificial Sequence
  human ApoB siRNA sequence
aggaataaatggagaagcaaatc

SEQ ID NO: 9610 - DNA, 23 bp, Artificial Sequence
  human ApoB siRNA sequence
ggaataaatggagaagcaaatct

SEQ ID NO: 9611 - DNA, 23 bp, Artificial Sequence
  human ApoB siRNA sequence
gaataaatggagaagcaaatctg

SEQ ID NO: 9612 - DNA, 23 bp, Artificial Sequence
  human ApoB siRNA sequence
aataaatggagaagcaaatctgg

SEQ ID NO: 9613 - DNA, 23 bp, Artificial Sequence
  human ApoB siRNA sequence
ataaatggagaagcaaatctgga

SEQ ID NO: 9614 - DNA, 23 bp, Artificial Sequence
  human ApoB siRNA sequence
taaatggagaagcaaatctggat

SEQ ID NO: 9615 - DNA, 23 bp, Artificial Sequence
  human ApoB siRNA sequence
aaatggagaagcaaatctggatt

SEQ ID NO: 9616 - DNA, 23 bp, Artificial Sequence
  human ApoB siRNA sequence
aatggagaagcaaatctggattt

SEQ ID NO: 9617 - DNA, 23 bp, Artificial Sequence
  human ApoB siRNA sequence
atggagaagcaaatctggatttc

SEQ ID NO: 9618 - DNA, 23 bp, Artificial Sequence
  human ApoB siRNA sequence
tggagaagcaaatctggatttct

SEQ ID NO: 9619 - DNA, 23 bp, Artificial Sequence
  human ApoB siRNA sequence
ggagaagcaaatctggatttctt

SEQ ID NO: 9620 - DNA, 23 bp, Artificial Sequence
  human ApoB siRNA sequence
gagaagcaaatctggatttctta

SEQ ID NO: 9621 - DNA, 23 bp, Artificial Sequence
  human ApoB siRNA sequence
agaagcaaatctggatttcttaa

SEQ ID NO: 9622 - DNA, 23 bp, Artificial Sequence
  human ApoB siRNA sequence
gaagcaaatctggatttcttaaa

SEQ ID NO: 9623 - DNA, 23 bp, Artificial Sequence
  human ApoB siRNA sequence
aagcaaatctggatttcttaaac

SEQ ID NO: 9624 - DNA, 23 bp, Artificial Sequence
  human ApoB siRNA sequence
agcaaatctggatttcttaaaca

SEQ ID NO: 9625 - DNA, 23 bp, Artificial Sequence
  human ApoB siRNA sequence
gcaaatctggatttcttaaacat

SEQ ID NO: 9626 - DNA, 23 bp, Artificial Sequence
  human ApoB siRNA sequence
caaatctggatttcttaaacatt

SEQ ID NO: 9627 - DNA, 23 bp, Artificial Sequence
  human ApoB siRNA sequence
aaatctggatttcttaaacattc

SEQ ID NO: 9628 - DNA, 23 bp, Artificial Sequence
  human ApoB siRNA sequence
aatctggatttcttaaacattcc

SEQ ID NO: 9629 - DNA, 23 bp, Artificial Sequence
  human ApoB siRNA sequence
atctggatttcttaaacattcct

SEQ ID NO: 9630 - DNA, 23 bp, Artificial Sequence
  human ApoB siRNA sequence
tctggatttcttaaacattcctt

SEQ ID NO: 9631 - DNA, 23 bp, Artificial Sequence
  human ApoB siRNA sequence
ctggatttcttaaacattccttt

SEQ ID NO: 9632 - DNA, 23 bp, Artificial Sequence
  human ApoB siRNA sequence
tggatttcttaaacattccttta

SEQ ID NO: 9633 - DNA, 23 bp, Artificial Sequence
  human ApoB siRNA sequence
ggatttcttaaacattcctttaa

SEQ ID NO: 9634 - DNA, 23 bp, Artificial Sequence
  human ApoB siRNA sequence
gatttcttaaacattcctttaac

SEQ ID NO: 9635 - DNA, 23 bp, Artificial Sequence
  human ApoB siRNA sequence
atttcttaaacattcctttaaca

SEQ ID NO: 9636 - DNA, 23 bp, Artificial Sequence
  human ApoB siRNA sequence
tttcttaaacattcctttaacaa

SEQ ID NO: 9637 - DNA, 23 bp, Artificial Sequence
  human ApoB siRNA sequence
ttcttaaacattcctttaacaat

SEQ ID NO: 9638 - DNA, 23 bp, Artificial Sequence
  human ApoB siRNA sequence
tcttaaacattcctttaacaatt

SEQ ID NO: 9639 - DNA, 23 bp, Artificial Sequence
  human ApoB siRNA sequence
cttaaacattcctttaacaattc

SEQ ID NO: 9640 - DNA, 23 bp, Artificial Sequence
  human ApoB siRNA sequence
ttaaacattcctttaacaattcc

SEQ ID NO: 9641 - DNA, 23 bp, Artificial Sequence
  human ApoB siRNA sequence
taaacattcctttaacaattcct

SEQ ID NO: 9642 - DNA, 23 bp, Artificial Sequence
  human ApoB siRNA sequence
aaacattcctttaacaattcctg

SEQ ID NO: 9643 - DNA, 23 bp, Artificial Sequence
  human ApoB siRNA sequence
aacattcctttaacaattcctga

SEQ ID NO: 9644 - DNA, 23 bp, Artificial Sequence
  human ApoB siRNA sequence
acattcctttaacaattcctgaa

SEQ ID NO: 9645 - DNA, 23 bp, Artificial Sequence
  human ApoB siRNA sequence
cattcctttaacaattcctgaaa

SEQ ID NO: 9646 - DNA, 23 bp, Artificial Sequence
  human ApoB siRNA sequence
attcctttaacaattcctgaaat

SEQ ID NO: 9647 - DNA, 23 bp, Artificial Sequence
  human ApoB siRNA sequence
ttcctttaacaattcctgaaatg

SEQ ID NO: 9648 - DNA, 23 bp, Artificial Sequence
  human ApoB siRNA sequence
tcctttaacaattcctgaaatgc

SEQ ID NO: 9649 - DNA, 23 bp, Artificial Sequence
  human ApoB siRNA sequence
cctttaacaattcctgaaatgcg

SEQ ID NO: 9650 - DNA, 23 bp, Artificial Sequence
  human ApoB siRNA sequence
ctttaacaattcctgaaatgcgt

SEQ ID NO: 9651 - DNA, 23 bp, Artificial Sequence
  human ApoB siRNA sequence
tttaacaattcctgaaatgcgtc

SEQ ID NO: 9652 - DNA, 23 bp, Artificial Sequence
  human ApoB siRNA sequence
ttaacaattcctgaaatgcgtct

SEQ ID NO: 9653 - DNA, 23 bp, Artificial Sequence
  human ApoB siRNA sequence
taacaattcctgaaatgcgtcta

SEQ ID NO: 9654 - DNA, 23 bp, Artificial Sequence
  human ApoB siRNA sequence
aacaattcctgaaatgcgtctac

SEQ ID NO: 9655 - DNA, 23 bp, Artificial Sequence
  human ApoB siRNA sequence
acaattcctgaaatgcgtctacc

SEQ ID NO: 9656 - DNA, 23 bp, Artificial Sequence
  human ApoB siRNA sequence
caattcctgaaatgcgtctacct

SEQ ID NO: 9657 - DNA, 23 bp, Artificial Sequence
  human ApoB siRNA sequence
aattcctgaaatgcgtctacctt

SEQ ID NO: 9658 - DNA, 23 bp, Artificial Sequence
  human ApoB siRNA sequence
attcctgaaatgcgtctacctta

SEQ ID NO: 9659 - DNA, 23 bp, Artificial Sequence
  human ApoB siRNA sequence
ttcctgaaatgcgtctaccttac

SEQ ID NO: 9660 - DNA, 23 bp, Artificial Sequence
  human ApoB siRNA sequence
tcctgaaatgcgtctaccttaca

SEQ ID NO: 9661 - DNA, 23 bp, Artificial Sequence
  human ApoB siRNA sequence
cctgaaatgcgtctaccttacac

SEQ ID NO: 9662 - DNA, 23 bp, Artificial Sequence
  human ApoB siRNA sequence
ctgaaatgcgtctaccttacaca

SEQ ID NO: 9663 - DNA, 23 bp, Artificial Sequence
  human ApoB siRNA sequence
tgaaatgcgtctaccttacacaa

SEQ ID NO: 9664 - DNA, 23 bp, Artificial Sequence
  human ApoB siRNA sequence
gaaatgcgtctaccttacacaat

SEQ ID NO: 9665 - DNA, 23 bp, Artificial Sequence
  human ApoB siRNA sequence
aaatgcgtctaccttacacaata

SEQ ID NO: 9666 - DNA, 23 bp, Artificial Sequence
  human ApoB siRNA sequence
aatgcgtctaccttacacaataa

SEQ ID NO: 9667 - DNA, 23 bp, Artificial Sequence
  human ApoB siRNA sequence
atgcgtctaccttacacaataat

SEQ ID NO: 9668 - DNA, 23 bp, Artificial Sequence
  human ApoB siRNA sequence
tgcgtctaccttacacaataatc

SEQ ID NO: 9669 - DNA, 23 bp, Artificial Sequence
  human ApoB siRNA sequence
gcgtctaccttacacaataatca

SEQ ID NO: 9670 - DNA, 23 bp, Artificial Sequence
  human ApoB siRNA sequence
cgtctaccttacacaataatcac

SEQ ID NO: 9671 - DNA, 23 bp, Artificial Sequence
  human ApoB siRNA sequence
gtctaccttacacaataatcaca

SEQ ID NO: 9672 - DNA, 23 bp, Artificial Sequence
  human ApoB siRNA sequence
tctaccttacacaataatcacaa

SEQ ID NO: 9673 - DNA, 23 bp, Artificial Sequence
  human ApoB siRNA sequence
ctaccttacacaataatcacaac

SEQ ID NO: 9674 - DNA, 23 bp, Artificial Sequence
  human ApoB siRNA sequence
taccttacacaataatcacaact

SEQ ID NO: 9675 - DNA, 23 bp, Artificial Sequence
  human ApoB siRNA sequence
accttacacaataatcacaactc

SEQ ID NO: 9676 - DNA, 23 bp, Artificial Sequence
  human ApoB siRNA sequence
ccttacacaataatcacaactcc

SEQ ID NO: 9677 - DNA, 23 bp, Artificial Sequence
  human ApoB siRNA sequence
cttacacaataatcacaactcct

SEQ ID NO: 9678 - DNA, 23 bp, Artificial Sequence
  human ApoB siRNA sequence
ttacacaataatcacaactcctc

SEQ ID NO: 9679 - DNA, 23 bp, Artificial Sequence
  human ApoB siRNA sequence
tacacaataatcacaactcctcc

SEQ ID NO: 9680 - DNA, 23 bp, Artificial Sequence
  human ApoB siRNA sequence
acacaataatcacaactcctcca

SEQ ID NO: 9681 - DNA, 23 bp, Artificial Sequence
  human ApoB siRNA sequence
cacaataatcacaactcctccac

SEQ ID NO: 9682 - DNA, 23 bp, Artificial Sequence
  human ApoB siRNA sequence
acaataatcacaactcctccact

SEQ ID NO: 9683 - DNA, 23 bp, Artificial Sequence
  human ApoB siRNA sequence
caataatcacaactcctccactg

SEQ ID NO: 9684 - DNA, 23 bp, Artificial Sequence
  human ApoB siRNA sequence
aataatcacaactcctccactga

SEQ ID NO: 9685 - DNA, 23 bp, Artificial Sequence
  human ApoB siRNA sequence
ataatcacaactcctccactgaa

SEQ ID NO: 9686 - DNA, 23 bp, Artificial Sequence
  human ApoB siRNA sequence
taatcacaactcctccactgaaa

SEQ ID NO: 9687 - DNA, 23 bp, Artificial Sequence
  human ApoB siRNA sequence
aatcacaactcctccactgaaag

SEQ ID NO: 9688 - DNA, 23 bp, Artificial Sequence
  human ApoB siRNA sequence
atcacaactcctccactgaaaga

SEQ ID NO: 9689 - DNA, 23 bp, Artificial Sequence
  human ApoB siRNA sequence
tcacaactcctccactgaaagat

SEQ ID NO: 9690 - DNA, 23 bp, Artificial Sequence
  human ApoB siRNA sequence
cacaactcctccactgaaagatt

SEQ ID NO: 9691 - DNA, 23 bp, Artificial Sequence
  human ApoB siRNA sequence
acaactcctccactgaaagattt

SEQ ID NO: 9692 - DNA, 23 bp, Artificial Sequence
  human ApoB siRNA sequence
caactcctccactgaaagatttc

SEQ ID NO: 9693 - DNA, 23 bp, Artificial Sequence
  human ApoB siRNA sequence
aactcctccactgaaagatttct

SEQ ID NO: 9694 - DNA, 23 bp, Artificial Sequence
  human ApoB siRNA sequence
actcctccactgaaagatttctc

SEQ ID NO: 9695 - DNA, 23 bp, Artificial Sequence
  human ApoB siRNA sequence
ctcctccactgaaagatttctct

SEQ ID NO: 9696 - DNA, 23 bp, Artificial Sequence
  human ApoB siRNA sequence
tcctccactgaaagatttctctc

SEQ ID NO: 9697 - DNA, 23 bp, Artificial Sequence
  human ApoB siRNA sequence
cctccactgaaagatttctctct

SEQ ID NO: 9698 - DNA, 23 bp, Artificial Sequence
  human ApoB siRNA sequence
ctccactgaaagatttctctcta

SEQ ID NO: 9699 - DNA, 23 bp, Artificial Sequence
  human ApoB siRNA sequence
tccactgaaagatttctctctat

SEQ ID NO: 9700 - DNA, 23 bp, Artificial Sequence
  human ApoB siRNA sequence
ccactgaaagatttctctctatg

SEQ ID NO: 9701 - DNA, 23 bp, Artificial Sequence
  human ApoB siRNA sequence
cactgaaagatttctctctatgg

SEQ ID NO: 9702 - DNA, 23 bp, Artificial Sequence
  human ApoB siRNA sequence
actgaaagatttctctctatggg

SEQ ID NO: 9703 - DNA, 23 bp, Artificial Sequence
  human ApoB siRNA sequence
ctgaaagatttctctctatggga

SEQ ID NO: 9704 - DNA, 23 bp, Artificial Sequence
  human ApoB siRNA sequence
tgaaagatttctctctatgggaa

SEQ ID NO: 9705 - DNA, 23 bp, Artificial Sequence
  human ApoB siRNA sequence
gaaagatttctctctatgggaaa

SEQ ID NO: 9706 - DNA, 23 bp, Artificial Sequence
  human ApoB siRNA sequence
aaagatttctctctatgggaaaa

SEQ ID NO: 9707 - DNA, 23 bp, Artificial Sequence
  human ApoB siRNA sequence
aagatttctctctatgggaaaaa

SEQ ID NO: 9708 - DNA, 23 bp, Artificial Sequence
  human ApoB siRNA sequence
agatttctctctatgggaaaaaa

SEQ ID NO: 9709 - DNA, 23 bp, Artificial Sequence
  human ApoB siRNA sequence
gatttctctctatgggaaaaaac

SEQ ID NO: 9710 - DNA, 23 bp, Artificial Sequence
  human ApoB siRNA sequence
atttctctctatgggaaaaaaca

SEQ ID NO: 9711 - DNA, 23 bp, Artificial Sequence
  human ApoB siRNA sequence
tttctctctatgggaaaaaacag

SEQ ID NO: 9712 - DNA, 23 bp, Artificial Sequence
  human ApoB siRNA sequence
ttctctctatgggaaaaaacagg

SEQ ID NO: 9713 - DNA, 23 bp, Artificial Sequence
  human ApoB siRNA sequence
tctctctatgggaaaaaacaggc

SEQ ID NO: 9714 - DNA, 23 bp, Artificial Sequence
  human ApoB siRNA sequence
ctctctatgggaaaaaacaggct

SEQ ID NO: 9715 - DNA, 23 bp, Artificial Sequence
  human ApoB siRNA sequence
tctctatgggaaaaaacaggctt

SEQ ID NO: 9716 - DNA, 23 bp, Artificial Sequence
  human ApoB siRNA sequence
ctctatgggaaaaaacaggcttg

SEQ ID NO: 9717 - DNA, 23 bp, Artificial Sequence
  human ApoB siRNA sequence
tctatgggaaaaaacaggcttga

SEQ ID NO: 9718 - DNA, 23 bp, Artificial Sequence
  human ApoB siRNA sequence
ctatgggaaaaaacaggcttgaa

SEQ ID NO: 9719 - DNA, 23 bp, Artificial Sequence
  human ApoB siRNA sequence
tatgggaaaaaacaggcttgaag

SEQ ID NO: 9720 - DNA, 23 bp, Artificial Sequence
  human ApoB siRNA sequence
atgggaaaaaacaggcttgaagg

SEQ ID NO: 9721 - DNA, 23 bp, Artificial Sequence
  human ApoB siRNA sequence
tgggaaaaaacaggcttgaagga

SEQ ID NO: 9722 - DNA, 23 bp, Artificial Sequence
  human ApoB siRNA sequence
gggaaaaaacaggcttgaaggaa

SEQ ID NO: 9723 - DNA, 23 bp, Artificial Sequence
  human ApoB siRNA sequence
ggaaaaaacaggcttgaaggaat

SEQ ID NO: 9724 - DNA, 23 bp, Artificial Sequence
  human ApoB siRNA sequence
gaaaaaacaggcttgaaggaatt

SEQ ID NO: 9725 - DNA, 23 bp, Artificial Sequence
  human ApoB siRNA sequence
aaaaaacaggcttgaaggaattc

SEQ ID NO: 9726 - DNA, 23 bp, Artificial Sequence
  human ApoB siRNA sequence
aaaaacaggcttgaaggaattct

SEQ ID NO: 9727 - DNA, 23 bp, Artificial Sequence
  human ApoB siRNA sequence
aaaacaggcttgaaggaattctt

SEQ ID NO: 9728 - DNA, 23 bp, Artificial Sequence
  human ApoB siRNA sequence
aaacaggcttgaaggaattcttg

SEQ ID NO: 9729 - DNA, 23 bp, Artificial Sequence
  human ApoB siRNA sequence
aacaggcttgaaggaattcttga

SEQ ID NO: 9730 - DNA, 23 bp, Artificial Sequence
  human ApoB siRNA sequence
acaggcttgaaggaattcttgaa

SEQ ID NO: 9731 - DNA, 23 bp, Artificial Sequence
  human ApoB siRNA sequence
caggcttgaaggaattcttgaaa

SEQ ID NO: 9732 - DNA, 23 bp, Artificial Sequence
  human ApoB siRNA sequence
aggcttgaaggaattcttgaaaa

SEQ ID NO: 9733 - DNA, 23 bp, Artificial Sequence
  human ApoB siRNA sequence
ggcttgaaggaattcttgaaaac

SEQ ID NO: 9734 - DNA, 23 bp, Artificial Sequence
  human ApoB siRNA sequence
gcttgaaggaattcttgaaaacg

SEQ ID NO: 9735 - DNA, 23 bp, Artificial Sequence
  human ApoB siRNA sequence
cttgaaggaattcttgaaaacga

SEQ ID NO: 9736 - DNA, 23 bp, Artificial Sequence
  human ApoB siRNA sequence
ttgaaggaattcttgaaaacgac

SEQ ID NO: 9737 - DNA, 23 bp, Artificial Sequence
  human ApoB siRNA sequence
tgaaggaattcttgaaaacgaca

SEQ ID NO: 9738 - DNA, 23 bp, Artificial Sequence
  human ApoB siRNA sequence
gaaggaattcttgaaaacgacaa

SEQ ID NO: 9739 - DNA, 23 bp, Artificial Sequence
  human ApoB siRNA sequence
aaggaattcttgaaaacgacaaa

SEQ ID NO: 9740 - DNA, 23 bp, Artificial Sequence
  human ApoB siRNA sequence
aggaattcttgaaaacgacaaag

SEQ ID NO: 9741 - DNA, 23 bp, Artificial Sequence
  human ApoB siRNA sequence
ggaattcttgaaaacgacaaagc

SEQ ID NO: 9742 - DNA, 23 bp, Artificial Sequence
  human ApoB siRNA sequence
gaattcttgaaaacgacaaagca

SEQ ID NO: 9743 - DNA, 23 bp, Artificial Sequence
  human ApoB siRNA sequence
aattcttgaaaacgacaaagcaa

SEQ ID NO: 9744 - DNA, 23 bp, Artificial Sequence
  human ApoB siRNA sequence
attcttgaaaacgacaaagcaat

SEQ ID NO: 9745 - DNA, 23 bp, Artificial Sequence
  human ApoB siRNA sequence
ttcttgaaaacgacaaagcaatc

SEQ ID NO: 9746 - DNA, 23 bp, Artificial Sequence
  human ApoB siRNA sequence
tcttgaaaacgacaaagcaatca

SEQ ID NO: 9747 - DNA, 23 bp, Artificial Sequence
  human ApoB siRNA sequence
cttgaaaacgacaaagcaatcat

SEQ ID NO: 9748 - DNA, 23 bp, Artificial Sequence
  human ApoB siRNA sequence
ttgaaaacgacaaagcaatcatt

SEQ ID NO: 9749 - DNA, 23 bp, Artificial Sequence
  human ApoB siRNA sequence
tgaaaacgacaaagcaatcattt

SEQ ID NO: 9750 - DNA, 23 bp, Artificial Sequence
  human ApoB siRNA sequence
gaaaacgacaaagcaatcatttg

SEQ ID NO: 9751 - DNA, 23 bp, Artificial Sequence
  human ApoB siRNA sequence
aaaacgacaaagcaatcatttga

SEQ ID NO: 9752 - DNA, 23 bp, Artificial Sequence
  human ApoB siRNA sequence
aaacgacaaagcaatcatttgat

SEQ ID NO: 9753 - DNA, 23 bp, Artificial Sequence
  human ApoB siRNA sequence
aacgacaaagcaatcatttgatt

SEQ ID NO: 9754 - DNA, 23 bp, Artificial Sequence
  human ApoB siRNA sequence
acgacaaagcaatcatttgattt

SEQ ID NO: 9755 - DNA, 23 bp, Artificial Sequence
  human ApoB siRNA sequence
cgacaaagcaatcatttgattta

SEQ ID NO: 9756 - DNA, 23 bp, Artificial Sequence
  human ApoB siRNA sequence
gacaaagcaatcatttgatttaa

SEQ ID NO: 9757 - DNA, 23 bp, Artificial Sequence
  human ApoB siRNA sequence
acaaagcaatcatttgatttaag

SEQ ID NO: 9758 - DNA, 23 bp, Artificial Sequence
  human ApoB siRNA sequence
caaagcaatcatttgatttaagt

SEQ ID NO: 9759 - DNA, 23 bp, Artificial Sequence
  human ApoB siRNA sequence
aaagcaatcatttgatttaagtg

SEQ ID NO: 9760 - DNA, 23 bp, Artificial Sequence
  human ApoB siRNA sequence
aagcaatcatttgatttaagtgt

SEQ ID NO: 9761 - DNA, 23 bp, Artificial Sequence
  human ApoB siRNA sequence
agcaatcatttgatttaagtgta

SEQ ID NO: 9762 - DNA, 23 bp, Artificial Sequence
  human ApoB siRNA sequence
gcaatcatttgatttaagtgtaa

SEQ ID NO: 9763 - DNA, 23 bp, Artificial Sequence
  human ApoB siRNA sequence
caatcatttgatttaagtgtaaa

SEQ ID NO: 9764 - DNA, 23 bp, Artificial Sequence
  human ApoB siRNA sequence
aatcatttgatttaagtgtaaaa

SEQ ID NO: 9765 - DNA, 23 bp, Artificial Sequence
  human ApoB siRNA sequence
atcatttgatttaagtgtaaaag

SEQ ID NO: 9766 - DNA, 23 bp, Artificial Sequence
  human ApoB siRNA sequence
tcatttgatttaagtgtaaaagc

SEQ ID NO: 9767 - DNA, 23 bp, Artificial Sequence
  human ApoB siRNA sequence
catttgatttaagtgtaaaagct

SEQ ID NO: 9768 - DNA, 23 bp, Artificial Sequence
  human ApoB siRNA sequence
atttgatttaagtgtaaaagctc

SEQ ID NO: 9769 - DNA, 23 bp, Artificial Sequence
  human ApoB siRNA sequence
tttgatttaagtgtaaaagctca

SEQ ID NO: 9770 - DNA, 23 bp, Artificial Sequence
  human ApoB siRNA sequence
ttgatttaagtgtaaaagctcag

SEQ ID NO: 9771 - DNA, 23 bp, Artificial Sequence
  human ApoB siRNA sequence
tgatttaagtgtaaaagctcagt

SEQ ID NO: 9772 - DNA, 23 bp, Artificial Sequence
  human ApoB siRNA sequence
gatttaagtgtaaaagctcagta

SEQ ID NO: 9773 - DNA, 23 bp, Artificial Sequence
  human ApoB siRNA sequence
atttaagtgtaaaagctcagtat

SEQ ID NO: 9774 - DNA, 23 bp, Artificial Sequence
  human ApoB siRNA sequence
tttaagtgtaaaagctcagtata

SEQ ID NO: 9775 - DNA, 23 bp, Artificial Sequence
  human ApoB siRNA sequence
ttaagtgtaaaagctcagtataa

SEQ ID NO: 9776 - DNA, 23 bp, Artificial Sequence
  human ApoB siRNA sequence
taagtgtaaaagctcagtataag

SEQ ID NO: 9777 - DNA, 23 bp, Artificial Sequence
  human ApoB siRNA sequence
aagtgtaaaagctcagtataaga

SEQ ID NO: 9778 - DNA, 23 bp, Artificial Sequence
  human ApoB siRNA sequence
agtgtaaaagctcagtataagaa

SEQ ID NO: 9779 - DNA, 23 bp, Artificial Sequence
  human ApoB siRNA sequence
gtgtaaaagctcagtataagaaa

SEQ ID NO: 9780 - DNA, 23 bp, Artificial Sequence
  human ApoB siRNA sequence
tgtaaaagctcagtataagaaaa

SEQ ID NO: 9781 - DNA, 23 bp, Artificial Sequence
  human ApoB siRNA sequence
gtaaaagctcagtataagaaaaa

SEQ ID NO: 9782 - DNA, 23 bp, Artificial Sequence
  human ApoB siRNA sequence
taaaagctcagtataagaaaaac

SEQ ID NO: 9783 - DNA, 23 bp, Artificial Sequence
  human ApoB siRNA sequence
aaaagctcagtataagaaaaaca

SEQ ID NO: 9784 - DNA, 23 bp, Artificial Sequence
  human ApoB siRNA sequence
aaagctcagtataagaaaaacaa

SEQ ID NO: 9785 - DNA, 23 bp, Artificial Sequence
  human ApoB siRNA sequence
aagctcagtataagaaaaacaaa

SEQ ID NO: 9786 - DNA, 23 bp, Artificial Sequence
  human ApoB siRNA sequence
agctcagtataagaaaaacaaac

SEQ ID NO: 9787 - DNA, 23 bp, Artificial Sequence
  human ApoB siRNA sequence
gctcagtataagaaaaacaaaca

SEQ ID NO: 9788 - DNA, 23 bp, Artificial Sequence
  human ApoB siRNA sequence
ctcagtataagaaaaacaaacac

SEQ ID NO: 9789 - DNA, 23 bp, Artificial Sequence
  human ApoB siRNA sequence
tcagtataagaaaaacaaacaca

SEQ ID NO: 9790 - DNA, 23 bp, Artificial Sequence
  human ApoB siRNA sequence
cagtataagaaaaacaaacacag

SEQ ID NO: 9791 - DNA, 23 bp, Artificial Sequence
  human ApoB siRNA sequence
agtataagaaaaacaaacacagg

SEQ ID NO: 9792 - DNA, 23 bp, Artificial Sequence
  human ApoB siRNA sequence
gtataagaaaaacaaacacaggc

SEQ ID NO: 9793 - DNA, 23 bp, Artificial Sequence
  human ApoB siRNA sequence
tataagaaaaacaaacacaggca

SEQ ID NO: 9794 - DNA, 23 bp, Artificial Sequence
  human ApoB siRNA sequence
ataagaaaaacaaacacaggcat

SEQ ID NO: 9795 - DNA, 23 bp, Artificial Sequence
  human ApoB siRNA sequence
taagaaaaacaaacacaggcatt

SEQ ID NO: 9796 - DNA, 23 bp, Artificial Sequence
  human ApoB siRNA sequence
aagaaaaacaaacacaggcattc

SEQ ID NO: 9797 - DNA, 23 bp, Artificial Sequence
  human ApoB siRNA sequence
agaaaaacaaacacaggcattcc

SEQ ID NO: 9798 - DNA, 23 bp, Artificial Sequence
  human ApoB siRNA sequence
gaaaaacaaacacaggcattcca

SEQ ID NO: 9799 - DNA, 23 bp, Artificial Sequence
  human ApoB siRNA sequence
aaaaacaaacacaggcattccat

SEQ ID NO: 9800 - DNA, 23 bp, Artificial Sequence
  human ApoB siRNA sequence
aaaacaaacacaggcattccatc

SEQ ID NO: 9801 - DNA, 23 bp, Artificial Sequence
  human ApoB siRNA sequence
aaacaaacacaggcattccatca

SEQ ID NO: 9802 - DNA, 23 bp, Artificial Sequence
  human ApoB siRNA sequence
aacaaacacaggcattccatcac

SEQ ID NO: 9803 - DNA, 23 bp, Artificial Sequence
  human ApoB siRNA sequence
acaaacacaggcattccatcaca

SEQ ID NO: 9804 - DNA, 23 bp, Artificial Sequence
  human ApoB siRNA sequence
caaacacaggcattccatcacaa

SEQ ID NO: 9805 - DNA, 23 bp, Artificial Sequence
  human ApoB siRNA sequence
aaacacaggcattccatcacaaa

SEQ ID NO: 9806 - DNA, 23 bp, Artificial Sequence
  human ApoB siRNA sequence
aacacaggcattccatcacaaat

SEQ ID NO: 9807 - DNA, 23 bp, Artificial Sequence
  human ApoB siRNA sequence
acacaggcattccatcacaaatc

SEQ ID NO: 9808 - DNA, 23 bp, Artificial Sequence
  human ApoB siRNA sequence
cacaggcattccatcacaaatcc

SEQ ID NO: 9809 - DNA, 23 bp, Artificial Sequence
  human ApoB siRNA sequence
acaggcattccatcacaaatcct

SEQ ID NO: 9810 - DNA, 23 bp, Artificial Sequence
  human ApoB siRNA sequence
caggcattccatcacaaatcctt

SEQ ID NO: 9811 - DNA, 23 bp, Artificial Sequence
  human ApoB siRNA sequence
aggcattccatcacaaatccttt

SEQ ID NO: 9812 - DNA, 23 bp, Artificial Sequence
  human ApoB siRNA sequence
ggcattccatcacaaatcctttg

SEQ ID NO: 9813 - DNA, 23 bp, Artificial Sequence
  human ApoB siRNA sequence
gcattccatcacaaatcctttgg

SEQ ID NO: 9814 - DNA, 23 bp, Artificial Sequence
  human ApoB siRNA sequence
cattccatcacaaatcctttggc

SEQ ID NO: 9815 - DNA, 23 bp, Artificial Sequence
  human ApoB siRNA sequence
attccatcacaaatcctttggct

SEQ ID NO: 9816 - DNA, 23 bp, Artificial Sequence
  human ApoB siRNA sequence
ttccatcacaaatcctttggctg

SEQ ID NO: 9817 - DNA, 23 bp, Artificial Sequence
  human ApoB siRNA sequence
tccatcacaaatcctttggctgt

SEQ ID NO: 9818 - DNA, 23 bp, Artificial Sequence
  human ApoB siRNA sequence
ccatcacaaatcctttggctgtg

SEQ ID NO: 9819 - DNA, 23 bp, Artificial Sequence
  human ApoB siRNA sequence
catcacaaatcctttggctgtgc

SEQ ID NO: 9820 - DNA, 23 bp, Artificial Sequence
  human ApoB siRNA sequence
atcacaaatcctttggctgtgct

SEQ ID NO: 9821 - DNA, 23 bp, Artificial Sequence
  human ApoB siRNA sequence
tcacaaatcctttggctgtgctt

SEQ ID NO: 9822 - DNA, 23 bp, Artificial Sequence
  human ApoB siRNA sequence
cacaaatcctttggctgtgcttt

SEQ ID NO: 9823 - DNA, 23 bp, Artificial Sequence
  human ApoB siRNA sequence
acaaatcctttggctgtgctttg

SEQ ID NO: 9824 - DNA, 23 bp, Artificial Sequence
  human ApoB siRNA sequence
caaatcctttggctgtgctttgt

SEQ ID NO: 9825 - DNA, 23 bp, Artificial Sequence
  human ApoB siRNA sequence
aaatcctttggctgtgctttgtg

SEQ ID NO: 9826 - DNA, 23 bp, Artificial Sequence
  human ApoB siRNA sequence
aatcctttggctgtgctttgtga

SEQ ID NO: 9827 - DNA, 23 bp, Artificial Sequence
  human ApoB siRNA sequence
atcctttggctgtgctttgtgag

SEQ ID NO: 9828 - DNA, 23 bp, Artificial Sequence
  human ApoB siRNA sequence
tcctttggctgtgctttgtgagt

SEQ ID NO: 9829 - DNA, 23 bp, Artificial Sequence
  human ApoB siRNA sequence
cctttggctgtgctttgtgagtt

SEQ ID NO: 9830 - DNA, 23 bp, Artificial Sequence
  human ApoB siRNA sequence
ctttggctgtgctttgtgagttt

SEQ ID NO: 9831 - DNA, 23 bp, Artificial Sequence
  human ApoB siRNA sequence
tttggctgtgctttgtgagttta

SEQ ID NO: 9832 - DNA, 23 bp, Artificial Sequence
  human ApoB siRNA sequence
ttggctgtgctttgtgagtttat

SEQ ID NO: 9833 - DNA, 23 bp, Artificial Sequence
  human ApoB siRNA sequence
tggctgtgctttgtgagtttatc

SEQ ID NO: 9834 - DNA, 23 bp, Artificial Sequence
  human ApoB siRNA sequence
ggctgtgctttgtgagtttatca

SEQ ID NO: 9835 - DNA, 23 bp, Artificial Sequence
  human ApoB siRNA sequence
gctgtgctttgtgagtttatcag

SEQ ID NO: 9836 - DNA, 23 bp, Artificial Sequence
  human ApoB siRNA sequence
ctgtgctttgtgagtttatcagt

SEQ ID NO: 9837 - DNA, 23 bp, Artificial Sequence
  human ApoB siRNA sequence
tgtgctttgtgagtttatcagtc

SEQ ID NO: 9838 - DNA, 23 bp, Artificial Sequence
  human ApoB siRNA sequence
gtgctttgtgagtttatcagtca

SEQ ID NO: 9839 - DNA, 23 bp, Artificial Sequence
  human ApoB siRNA sequence
tgctttgtgagtttatcagtcag

SEQ ID NO: 9840 - DNA, 23 bp, Artificial Sequence
  human ApoB siRNA sequence
gctttgtgagtttatcagtcaga

SEQ ID NO: 9841 - DNA, 23 bp, Artificial Sequence
  human ApoB siRNA sequence
ctttgtgagtttatcagtcagag

SEQ ID NO: 9842 - DNA, 23 bp, Artificial Sequence
  human ApoB siRNA sequence
tttgtgagtttatcagtcagagc

SEQ ID NO: 9843 - DNA, 23 bp, Artificial Sequence
  human ApoB siRNA sequence
ttgtgagtttatcagtcagagca

SEQ ID NO: 9844 - DNA, 23 bp, Artificial Sequence
  human ApoB siRNA sequence
tgtgagtttatcagtcagagcat

SEQ ID NO: 9845 - DNA, 23 bp, Artificial Sequence
  human ApoB siRNA sequence
gtgagtttatcagtcagagcatc

SEQ ID NO: 9846 - DNA, 23 bp, Artificial Sequence
  human ApoB siRNA sequence
tgagtttatcagtcagagcatca

SEQ ID NO: 9847 - DNA, 23 bp, Artificial Sequence
  human ApoB siRNA sequence
gagtttatcagtcagagcatcaa

SEQ ID NO: 9848 - DNA, 23 bp, Artificial Sequence
  human ApoB siRNA sequence
agtttatcagtcagagcatcaaa

SEQ ID NO: 9849 - DNA, 23 bp, Artificial Sequence
  human ApoB siRNA sequence
gtttatcagtcagagcatcaaat

SEQ ID NO: 9850 - DNA, 23 bp, Artificial Sequence
  human ApoB siRNA sequence
tttatcagtcagagcatcaaatc

SEQ ID NO: 9851 - DNA, 23 bp, Artificial Sequence
  human ApoB siRNA sequence
ttatcagtcagagcatcaaatcc

SEQ ID NO: 9852 - DNA, 23 bp, Artificial Sequence
  human ApoB siRNA sequence
tatcagtcagagcatcaaatcct

SEQ ID NO: 9853 - DNA, 23 bp, Artificial Sequence
  human ApoB siRNA sequence
atcagtcagagcatcaaatcctt

SEQ ID NO: 9854 - DNA, 23 bp, Artificial Sequence
  human ApoB siRNA sequence
tcagtcagagcatcaaatccttt

SEQ ID NO: 9855 - DNA, 23 bp, Artificial Sequence
  human ApoB siRNA sequence
cagtcagagcatcaaatcctttg

SEQ ID NO: 9856 - DNA, 23 bp, Artificial Sequence
  human ApoB siRNA sequence
agtcagagcatcaaatcctttga

SEQ ID NO: 9857 - DNA, 23 bp, Artificial Sequence
  human ApoB siRNA sequence
gtcagagcatcaaatcctttgac

SEQ ID NO: 9858 - DNA, 23 bp, Artificial Sequence
  human ApoB siRNA sequence
tcagagcatcaaatcctttgaca

SEQ ID NO: 9859 - DNA, 23 bp, Artificial Sequence
  human ApoB siRNA sequence
cagagcatcaaatcctttgacag

SEQ ID NO: 9860 - DNA, 23 bp, Artificial Sequence
  human ApoB siRNA sequence
agagcatcaaatcctttgacagg

SEQ ID NO: 9861 - DNA, 23 bp, Artificial Sequence
  human ApoB siRNA sequence
gagcatcaaatcctttgacaggc

SEQ ID NO: 9862 - DNA, 23 bp, Artificial Sequence
  human ApoB siRNA sequence
agcatcaaatcctttgacaggca

SEQ ID NO: 9863 - DNA, 23 bp, Artificial Sequence
  human ApoB siRNA sequence
gcatcaaatcctttgacaggcat

SEQ ID NO: 9864 - DNA, 23 bp, Artificial Sequence
  human ApoB siRNA sequence
catcaaatcctttgacaggcatt

SEQ ID NO: 9865 - DNA, 23 bp, Artificial Sequence
  human ApoB siRNA sequence
atcaaatcctttgacaggcattt

SEQ ID NO: 9866 - DNA, 23 bp, Artificial Sequence
  human ApoB siRNA sequence
tcaaatcctttgacaggcatttt

SEQ ID NO: 9867 - DNA, 23 bp, Artificial Sequence
  human ApoB siRNA sequence
caaatcctttgacaggcattttg

SEQ ID NO: 9868 - DNA, 23 bp, Artificial Sequence
  human ApoB siRNA sequence
aaatcctttgacaggcattttga

SEQ ID NO: 9869 - DNA, 23 bp, Artificial Sequence
  human ApoB siRNA sequence
aatcctttgacaggcattttgaa

SEQ ID NO: 9870 - DNA, 23 bp, Artificial Sequence
  human ApoB siRNA sequence
atcctttgacaggcattttgaaa

SEQ ID NO: 9871 - DNA, 23 bp, Artificial Sequence
  human ApoB siRNA sequence
tcctttgacaggcattttgaaaa

SEQ ID NO: 9872 - DNA, 23 bp, Artificial Sequence
  human ApoB siRNA sequence
cctttgacaggcattttgaaaaa

SEQ ID NO: 9873 - DNA, 23 bp, Artificial Sequence
  human ApoB siRNA sequence
ctttgacaggcattttgaaaaaa

SEQ ID NO: 9874 - DNA, 23 bp, Artificial Sequence
  human ApoB siRNA sequence
tttgacaggcattttgaaaaaaa

SEQ ID NO: 9875 - DNA, 23 bp, Artificial Sequence
  human ApoB siRNA sequence
ttgacaggcattttgaaaaaaac

SEQ ID NO: 9876 - DNA, 23 bp, Artificial Sequence
  human ApoB siRNA sequence
tgacaggcattttgaaaaaaaca

SEQ ID NO: 9877 - DNA, 23 bp, Artificial Sequence
  human ApoB siRNA sequence
gacaggcattttgaaaaaaacag

SEQ ID NO: 9878 - DNA, 23 bp, Artificial Sequence
  human ApoB siRNA sequence
acaggcattttgaaaaaaacaga

SEQ ID NO: 9879 - DNA, 23 bp, Artificial Sequence
  human ApoB siRNA sequence
caggcattttgaaaaaaacagaa

SEQ ID NO: 9880 - DNA, 23 bp, Artificial Sequence
  human ApoB siRNA sequence
aggcattttgaaaaaaacagaaa

SEQ ID NO: 9881 - DNA, 23 bp, Artificial Sequence
  human ApoB siRNA sequence
ggcattttgaaaaaaacagaaac

SEQ ID NO: 9882 - DNA, 23 bp, Artificial Sequence
  human ApoB siRNA sequence
gcattttgaaaaaaacagaaaca

SEQ ID NO: 9883 - DNA, 23 bp, Artificial Sequence
  human ApoB siRNA sequence
cattttgaaaaaaacagaaacaa

SEQ ID NO: 9884 - DNA, 23 bp, Artificial Sequence
  human ApoB siRNA sequence
attttgaaaaaaacagaaacaat

SEQ ID NO: 9885 - DNA, 23 bp, Artificial Sequence
  human ApoB siRNA sequence
ttttgaaaaaaacagaaacaatg

SEQ ID NO: 9886 - DNA, 23 bp, Artificial Sequence
  human ApoB siRNA sequence
tttgaaaaaaacagaaacaatgc

SEQ ID NO: 9887 - DNA, 23 bp, Artificial Sequence
  human ApoB siRNA sequence
ttgaaaaaaacagaaacaatgca

SEQ ID NO: 9888 - DNA, 23 bp, Artificial Sequence
  human ApoB siRNA sequence
tgaaaaaaacagaaacaatgcat

SEQ ID NO: 9889 - DNA, 23 bp, Artificial Sequence
  human ApoB siRNA sequence
gaaaaaaacagaaacaatgcatt

SEQ ID NO: 9890 - DNA, 23 bp, Artificial Sequence
  human ApoB siRNA sequence
aaaaaaacagaaacaatgcatta

SEQ ID NO: 9891 - DNA, 23 bp, Artificial Sequence
  human ApoB siRNA sequence
aaaaaacagaaacaatgcattag

SEQ ID NO: 9892 - DNA, 23 bp, Artificial Sequence
  human ApoB siRNA sequence
aaaaacagaaacaatgcattaga

SEQ ID NO: 9893 - DNA, 23 bp, Artificial Sequence
  human ApoB siRNA sequence
aaaacagaaacaatgcattagat

SEQ ID NO: 9894 - DNA, 23 bp, Artificial Sequence
  human ApoB siRNA sequence
aaacagaaacaatgcattagatt

SEQ ID NO: 9895 - DNA, 23 bp, Artificial Sequence
  human ApoB siRNA sequence
aacagaaacaatgcattagattt

SEQ ID NO: 9896 - DNA, 23 bp, Artificial Sequence
  human ApoB siRNA sequence
acagaaacaatgcattagatttt

SEQ ID NO: 9897 - DNA, 23 bp, Artificial Sequence
  human ApoB siRNA sequence
cagaaacaatgcattagattttg

SEQ ID NO: 9898 - DNA, 23 bp, Artificial Sequence
  human ApoB siRNA sequence
agaaacaatgcattagattttgt

SEQ ID NO: 9899 - DNA, 23 bp, Artificial Sequence
  human ApoB siRNA sequence
gaaacaatgcattagattttgtc

SEQ ID NO: 9900 - DNA, 23 bp, Artificial Sequence
  human ApoB siRNA sequence
aaacaatgcattagattttgtca

SEQ ID NO: 9901 - DNA, 23 bp, Artificial Sequence
  human ApoB siRNA sequence
aacaatgcattagattttgtcac

SEQ ID NO: 9902 - DNA, 23 bp, Artificial Sequence
  human ApoB siRNA sequence
acaatgcattagattttgtcacc

SEQ ID NO: 9903 - DNA, 23 bp, Artificial Sequence
  human ApoB siRNA sequence
caatgcattagattttgtcacca

SEQ ID NO: 9904 - DNA, 23 bp, Artificial Sequence
  human ApoB siRNA sequence
aatgcattagattttgtcaccaa

SEQ ID NO: 9905 - DNA, 23 bp, Artificial Sequence
  human ApoB siRNA sequence
atgcattagattttgtcaccaaa

SEQ ID NO: 9906 - DNA, 23 bp, Artificial Sequence
  human ApoB siRNA sequence
tgcattagattttgtcaccaaat

SEQ ID NO: 9907 - DNA, 23 bp, Artificial Sequence
  human ApoB siRNA sequence
gcattagattttgtcaccaaatc

SEQ ID NO: 9908 - DNA, 23 bp, Artificial Sequence
  human ApoB siRNA sequence
cattagattttgtcaccaaatcc

SEQ ID NO: 9909 - DNA, 23 bp, Artificial Sequence
  human ApoB siRNA sequence
attagattttgtcaccaaatcct

SEQ ID NO: 9910 - DNA, 23 bp, Artificial Sequence
  human ApoB siRNA sequence
ttagattttgtcaccaaatccta

SEQ ID NO: 9911 - DNA, 23 bp, Artificial Sequence
  human ApoB siRNA sequence
tagattttgtcaccaaatcctat

SEQ ID NO: 9912 - DNA, 23 bp, Artificial Sequence
  human ApoB siRNA sequence
agattttgtcaccaaatcctata

SEQ ID NO: 9913 - DNA, 23 bp, Artificial Sequence
  human ApoB siRNA sequence
gattttgtcaccaaatcctataa

SEQ ID NO: 9914 - DNA, 23 bp, Artificial Sequence
  human ApoB siRNA sequence
attttgtcaccaaatcctataat

SEQ ID NO: 9915 - DNA, 23 bp, Artificial Sequence
  human ApoB siRNA sequence
ttttgtcaccaaatcctataatg

SEQ ID NO: 9916 - DNA, 23 bp, Artificial Sequence
  human ApoB siRNA sequence
tttgtcaccaaatcctataatga

SEQ ID NO: 9917 - DNA, 23 bp, Artificial Sequence
  human ApoB siRNA sequence
ttgtcaccaaatcctataatgaa

SEQ ID NO: 9918 - DNA, 23 bp, Artificial Sequence
  human ApoB siRNA sequence
tgtcaccaaatcctataatgaaa

SEQ ID NO: 9919 - DNA, 23 bp, Artificial Sequence
  human ApoB siRNA sequence
gtcaccaaatcctataatgaaac

SEQ ID NO: 9920 - DNA, 23 bp, Artificial Sequence
  human ApoB siRNA sequence
tcaccaaatcctataatgaaaca

SEQ ID NO: 9921 - DNA, 23 bp, Artificial Sequence
  human ApoB siRNA sequence
caccaaatcctataatgaaacaa

SEQ ID NO: 9922 - DNA, 23 bp, Artificial Sequence
  human ApoB siRNA sequence
accaaatcctataatgaaacaaa

SEQ ID NO: 9923 - DNA, 23 bp, Artificial Sequence
  human ApoB siRNA sequence
ccaaatcctataatgaaacaaaa

SEQ ID NO: 9924 - DNA, 23 bp, Artificial Sequence
  human ApoB siRNA sequence
caaatcctataatgaaacaaaaa

SEQ ID NO: 9925 - DNA, 23 bp, Artificial Sequence
  human ApoB siRNA sequence
aaatcctataatgaaacaaaaat

SEQ ID NO: 9926 - DNA, 23 bp, Artificial Sequence
  human ApoB siRNA sequence
aatcctataatgaaacaaaaatt

SEQ ID NO: 9927 - DNA, 23 bp, Artificial Sequence
  human ApoB siRNA sequence
atcctataatgaaacaaaaatta

SEQ ID NO: 9928 - DNA, 23 bp, Artificial Sequence
  human ApoB siRNA sequence
tcctataatgaaacaaaaattaa

SEQ ID NO: 9929 - DNA, 23 bp, Artificial Sequence
  human ApoB siRNA sequence
cctataatgaaacaaaaattaag

SEQ ID NO: 9930 - DNA, 23 bp, Artificial Sequence
  human ApoB siRNA sequence
ctataatgaaacaaaaattaagt

SEQ ID NO: 9931 - DNA, 23 bp, Artificial Sequence
  human ApoB siRNA sequence
tataatgaaacaaaaattaagtt

SEQ ID NO: 9932 - DNA, 23 bp, Artificial Sequence
  human ApoB siRNA sequence
ataatgaaacaaaaattaagttt

SEQ ID NO: 9933 - DNA, 23 bp, Artificial Sequence
  human ApoB siRNA sequence
taatgaaacaaaaattaagtttg

SEQ ID NO: 9934 - DNA, 23 bp, Artificial Sequence
  human ApoB siRNA sequence
aatgaaacaaaaattaagtttga

SEQ ID NO: 9935 - DNA, 23 bp, Artificial Sequence
  human ApoB siRNA sequence
atgaaacaaaaattaagtttgat

SEQ ID NO: 9936 - DNA, 23 bp, Artificial Sequence
  human ApoB siRNA sequence
tgaaacaaaaattaagtttgata

SEQ ID NO: 9937 - DNA, 23 bp, Artificial Sequence
  human ApoB siRNA sequence
gaaacaaaaattaagtttgataa

SEQ ID NO: 9938 - DNA, 23 bp, Artificial Sequence
  human ApoB siRNA sequence
aaacaaaaattaagtttgataag

SEQ ID NO: 9939 - DNA, 23 bp, Artificial Sequence
  human ApoB siRNA sequence
aacaaaaattaagtttgataagt

SEQ ID NO: 9940 - DNA, 23 bp, Artificial Sequence
  human ApoB siRNA sequence
acaaaaattaagtttgataagta

SEQ ID NO: 9941 - DNA, 23 bp, Artificial Sequence
  human ApoB siRNA sequence
caaaaattaagtttgataagtac

SEQ ID NO: 9942 - DNA, 23 bp, Artificial Sequence
  human ApoB siRNA sequence
aaaaattaagtttgataagtaca

SEQ ID NO: 9943 - DNA, 23 bp, Artificial Sequence
  human ApoB siRNA sequence
aaaattaagtttgataagtacaa

SEQ ID NO: 9944 - DNA, 23 bp, Artificial Sequence
  human ApoB siRNA sequence
aaattaagtttgataagtacaaa

SEQ ID NO: 9945 - DNA, 23 bp, Artificial Sequence
  human ApoB siRNA sequence
aattaagtttgataagtacaaag

SEQ ID NO: 9946 - DNA, 23 bp, Artificial Sequence
  human ApoB siRNA sequence
attaagtttgataagtacaaagc

SEQ ID NO: 9947 - DNA, 23 bp, Artificial Sequence
  human ApoB siRNA sequence
ttaagtttgataagtacaaagct

SEQ ID NO: 9948 - DNA, 23 bp, Artificial Sequence
  human ApoB siRNA sequence
taagtttgataagtacaaagctg

SEQ ID NO: 9949 - DNA, 23 bp, Artificial Sequence
  human ApoB siRNA sequence
aagtttgataagtacaaagctga

SEQ ID NO: 9950 - DNA, 23 bp, Artificial Sequence
  human ApoB siRNA sequence
agtttgataagtacaaagctgaa

SEQ ID NO: 9951 - DNA, 23 bp, Artificial Sequence
  human ApoB siRNA sequence
gtttgataagtacaaagctgaaa

SEQ ID NO: 9952 - DNA, 23 bp, Artificial Sequence
  human ApoB siRNA sequence
tttgataagtacaaagctgaaaa

SEQ ID NO: 9953 - DNA, 23 bp, Artificial Sequence
  human ApoB siRNA sequence
ttgataagtacaaagctgaaaaa

SEQ ID NO: 9954 - DNA, 23 bp, Artificial Sequence
  human ApoB siRNA sequence
tgataagtacaaagctgaaaaat

SEQ ID NO: 9955 - DNA, 23 bp, Artificial Sequence
  human ApoB siRNA sequence
gataagtacaaagctgaaaaatc

SEQ ID NO: 9956 - DNA, 23 bp, Artificial Sequence
  human ApoB siRNA sequence
ataagtacaaagctgaaaaatct

SEQ ID NO: 9957 - DNA, 23 bp, Artificial Sequence
  human ApoB siRNA sequence
taagtacaaagctgaaaaatctc

SEQ ID NO: 9958 - DNA, 23 bp, Artificial Sequence
  human ApoB siRNA sequence
aagtacaaagctgaaaaatctca

SEQ ID NO: 9959 - DNA, 23 bp, Artificial Sequence
  human ApoB siRNA sequence
agtacaaagctgaaaaatctcac

SEQ ID NO: 9960 - DNA, 23 bp, Artificial Sequence
  human ApoB siRNA sequence
gtacaaagctgaaaaatctcacg

SEQ ID NO: 9961 - DNA, 23 bp, Artificial Sequence
  human ApoB siRNA sequence
tacaaagctgaaaaatctcacga

SEQ ID NO: 9962 - DNA, 23 bp, Artificial Sequence
  human ApoB siRNA sequence
acaaagctgaaaaatctcacgac

SEQ ID NO: 9963 - DNA, 23 bp, Artificial Sequence
  human ApoB siRNA sequence
caaagctgaaaaatctcacgacg

SEQ ID NO: 9964 - DNA, 23 bp, Artificial Sequence
  human ApoB siRNA sequence
aaagctgaaaaatctcacgacga

SEQ ID NO: 9965 - DNA, 23 bp, Artificial Sequence
  human ApoB siRNA sequence
aagctgaaaaatctcacgacgag

SEQ ID NO: 9966 - DNA, 23 bp, Artificial Sequence
  human ApoB siRNA sequence
agctgaaaaatctcacgacgagc

SEQ ID NO: 9967 - DNA, 23 bp, Artificial Sequence
  human ApoB siRNA sequence
gctgaaaaatctcacgacgagct

SEQ ID NO: 9968 - DNA, 23 bp, Artificial Sequence
  human ApoB siRNA sequence
ctgaaaaatctcacgacgagctc

SEQ ID NO: 9969 - DNA, 23 bp, Artificial Sequence
  human ApoB siRNA sequence
tgaaaaatctcacgacgagctcc

SEQ ID NO: 9970 - DNA, 23 bp, Artificial Sequence
  human ApoB siRNA sequence
gaaaaatctcacgacgagctccc

SEQ ID NO: 9971 - DNA, 23 bp, Artificial Sequence
  human ApoB siRNA sequence
aaaaatctcacgacgagctcccc

SEQ ID NO: 9972 - DNA, 23 bp, Artificial Sequence
  human ApoB siRNA sequence
aaaatctcacgacgagctcccca

SEQ ID NO: 9973 - DNA, 23 bp, Artificial Sequence
  human ApoB siRNA sequence
aaatctcacgacgagctccccag

SEQ ID NO: 9974 - DNA, 23 bp, Artificial Sequence
  human ApoB siRNA sequence
aatctcacgacgagctccccagg

SEQ ID NO: 9975 - DNA, 23 bp, Artificial Sequence
  human ApoB siRNA sequence
atctcacgacgagctccccagga

SEQ ID NO: 9976 - DNA, 23 bp, Artificial Sequence
  human ApoB siRNA sequence
tctcacgacgagctccccaggac

SEQ ID NO: 9977 - DNA, 23 bp, Artificial Sequence
  human ApoB siRNA sequence
ctcacgacgagctccccaggacc

SEQ ID NO: 9978 - DNA, 23 bp, Artificial Sequence
  human ApoB siRNA sequence
tcacgacgagctccccaggacct

SEQ ID NO: 9979 - DNA, 23 bp, Artificial Sequence
  human ApoB siRNA sequence
cacgacgagctccccaggacctt

SEQ ID NO: 9980 - DNA, 23 bp, Artificial Sequence
  human ApoB siRNA sequence
acgacgagctccccaggaccttt

SEQ ID NO: 9981 - DNA, 23 bp, Artificial Sequence
  human ApoB siRNA sequence
cgacgagctccccaggacctttc

SEQ ID NO: 9982 - DNA, 23 bp, Artificial Sequence
  human ApoB siRNA sequence
gacgagctccccaggacctttca

SEQ ID NO: 9983 - DNA, 23 bp, Artificial Sequence
  human ApoB siRNA sequence
acgagctccccaggacctttcaa

SEQ ID NO: 9984 - DNA, 23 bp, Artificial Sequence
  human ApoB siRNA sequence
cgagctccccaggacctttcaaa

SEQ ID NO: 9985 - DNA, 23 bp, Artificial Sequence
  human ApoB siRNA sequence
gagctccccaggacctttcaaat

SEQ ID NO: 9986 - DNA, 23 bp, Artificial Sequence
  human ApoB siRNA sequence
agctccccaggacctttcaaatt

SEQ ID NO: 9987 - DNA, 23 bp, Artificial Sequence
  human ApoB siRNA sequence
gctccccaggacctttcaaattc

SEQ ID NO: 9988 - DNA, 23 bp, Artificial Sequence
  human ApoB siRNA sequence
ctccccaggacctttcaaattcc

SEQ ID NO: 9989 - DNA, 23 bp, Artificial Sequence
  human ApoB siRNA sequence
tccccaggacctttcaaattcct

SEQ ID NO: 9990 - DNA, 23 bp, Artificial Sequence
  human ApoB siRNA sequence
ccccaggacctttcaaattcctg

SEQ ID NO: 9991 - DNA, 23 bp, Artificial Sequence
  human ApoB siRNA sequence
cccaggacctttcaaattcctgg

SEQ ID NO: 9992 - DNA, 23 bp, Artificial Sequence
  human ApoB siRNA sequence
ccaggacctttcaaattcctgga

SEQ ID NO: 9993 - DNA, 23 bp, Artificial Sequence
  human ApoB siRNA sequence
caggacctttcaaattcctggat

SEQ ID NO: 9994 - DNA, 23 bp, Artificial Sequence
  human ApoB siRNA sequence
aggacctttcaaattcctggata

SEQ ID NO: 9995 - DNA, 23 bp, Artificial Sequence
  human ApoB siRNA sequence
ggacctttcaaattcctggatac

SEQ ID NO: 9996 - DNA, 23 bp, Artificial Sequence
  human ApoB siRNA sequence
gacctttcaaattcctggataca

SEQ ID NO: 9997 - DNA, 23 bp, Artificial Sequence
  human ApoB siRNA sequence
acctttcaaattcctggatacac

SEQ ID NO: 9998 - DNA, 23 bp, Artificial Sequence
  human ApoB siRNA sequence
cctttcaaattcctggatacact

SEQ ID NO: 9999 - DNA, 23 bp, Artificial Sequence
  human ApoB siRNA sequence
ctttcaaattcctggatacactg

SEQ ID NO: 10000 - DNA, 23 bp, Artificial Sequence
  human ApoB siRNA sequence
tttcaaattcctggatacactgt

SEQ ID NO: 10001 - DNA, 23 bp, Artificial Sequence
  human ApoB siRNA sequence
ttcaaattcctggatacactgtt

SEQ ID NO: 10002 - DNA, 23 bp, Artificial Sequence
  human ApoB siRNA sequence
tcaaattcctggatacactgttc

SEQ ID NO: 10003 - DNA, 23 bp, Artificial Sequence
  human ApoB siRNA sequence
caaattcctggatacactgttcc

SEQ ID NO: 10004 - DNA, 23 bp, Artificial Sequence
  human ApoB siRNA sequence
aaattcctggatacactgttcca

SEQ ID NO: 10005 - DNA, 23 bp, Artificial Sequence
  human ApoB siRNA sequence
aattcctggatacactgttccag

SEQ ID NO: 10006 - DNA, 23 bp, Artificial Sequence
  human ApoB siRNA sequence
attcctggatacactgttccagt

SEQ ID NO: 10007 - DNA, 23 bp, Artificial Sequence
  human ApoB siRNA sequence
ttcctggatacactgttccagtt

SEQ ID NO: 10008 - DNA, 23 bp, Artificial Sequence
  human ApoB siRNA sequence
tcctggatacactgttccagttg

SEQ ID NO: 10009 - DNA, 23 bp, Artificial Sequence
  human ApoB siRNA sequence
cctggatacactgttccagttgt

SEQ ID NO: 10010 - DNA, 23 bp, Artificial Sequence
  human ApoB siRNA sequence
ctggatacactgttccagttgtc

SEQ ID NO: 10011 - DNA, 23 bp, Artificial Sequence
  human ApoB siRNA sequence
tggatacactgttccagttgtca

SEQ ID NO: 10012 - DNA, 23 bp, Artificial Sequence
  human ApoB siRNA sequence
ggatacactgttccagttgtcaa

SEQ ID NO: 10013 - DNA, 23 bp, Artificial Sequence
  human ApoB siRNA sequence
gatacactgttccagttgtcaat

SEQ ID NO: 10014 - DNA, 23 bp, Artificial Sequence
  human ApoB siRNA sequence
atacactgttccagttgtcaatg

SEQ ID NO: 10015 - DNA, 23 bp, Artificial Sequence
  human ApoB siRNA sequence
tacactgttccagttgtcaatgt

SEQ ID NO: 10016 - DNA, 23 bp, Artificial Sequence
  human ApoB siRNA sequence
acactgttccagttgtcaatgtt

SEQ ID NO: 10017 - DNA, 23 bp, Artificial Sequence
  human ApoB siRNA sequence
cactgttccagttgtcaatgttg

SEQ ID NO: 10018 - DNA, 23 bp, Artificial Sequence
  human ApoB siRNA sequence
actgttccagttgtcaatgttga

SEQ ID NO: 10019 - DNA, 23 bp, Artificial Sequence
  human ApoB siRNA sequence
ctgttccagttgtcaatgttgaa

SEQ ID NO: 10020 - DNA, 23 bp, Artificial Sequence
  human ApoB siRNA sequence
tgttccagttgtcaatgttgaag

SEQ ID NO: 10021 - DNA, 23 bp, Artificial Sequence
  human ApoB siRNA sequence
gttccagttgtcaatgttgaagt

SEQ ID NO: 10022 - DNA, 23 bp, Artificial Sequence
  human ApoB siRNA sequence
ttccagttgtcaatgttgaagtg

SEQ ID NO: 10023 - DNA, 23 bp, Artificial Sequence
  human ApoB siRNA sequence
tccagttgtcaatgttgaagtgt

SEQ ID NO: 10024 - DNA, 23 bp, Artificial Sequence
  human ApoB siRNA sequence
ccagttgtcaatgttgaagtgtc

SEQ ID NO: 10025 - DNA, 23 bp, Artificial Sequence
  human ApoB siRNA sequence
cagttgtcaatgttgaagtgtct

SEQ ID NO: 10026 - DNA, 23 bp, Artificial Sequence
  human ApoB siRNA sequence
agttgtcaatgttgaagtgtctc

SEQ ID NO: 10027 - DNA, 23 bp, Artificial Sequence
  human ApoB siRNA sequence
gttgtcaatgttgaagtgtctcc

SEQ ID NO: 10028 - DNA, 23 bp, Artificial Sequence
  human ApoB siRNA sequence
ttgtcaatgttgaagtgtctcca

SEQ ID NO: 10029 - DNA, 23 bp, Artificial Sequence
  human ApoB siRNA sequence
tgtcaatgttgaagtgtctccat

SEQ ID NO: 10030 - DNA, 23 bp, Artificial Sequence
  human ApoB siRNA sequence
gtcaatgttgaagtgtctccatt

SEQ ID NO: 10031 - DNA, 23 bp, Artificial Sequence
  human ApoB siRNA sequence
tcaatgttgaagtgtctccattc

SEQ ID NO: 10032 - DNA, 23 bp, Artificial Sequence
  human ApoB siRNA sequence
caatgttgaagtgtctccattca

SEQ ID NO: 10033 - DNA, 23 bp, Artificial Sequence
  human ApoB siRNA sequence
aatgttgaagtgtctccattcac

SEQ ID NO: 10034 - DNA, 23 bp, Artificial Sequence
  human ApoB siRNA sequence
atgttgaagtgtctccattcacc

SEQ ID NO: 10035 - DNA, 23 bp, Artificial Sequence
  human ApoB siRNA sequence
tgttgaagtgtctccattcacca

SEQ ID NO: 10036 - DNA, 23 bp, Artificial Sequence
  human ApoB siRNA sequence
gttgaagtgtctccattcaccat

SEQ ID NO: 10037 - DNA, 23 bp, Artificial Sequence
  human ApoB siRNA sequence
ttgaagtgtctccattcaccata

SEQ ID NO: 10038 - DNA, 23 bp, Artificial Sequence
  human ApoB siRNA sequence
tgaagtgtctccattcaccatag

SEQ ID NO: 10039 - DNA, 23 bp, Artificial Sequence
  human ApoB siRNA sequence
gaagtgtctccattcaccataga

SEQ ID NO: 10040 - DNA, 23 bp, Artificial Sequence
  human ApoB siRNA sequence
aagtgtctccattcaccatagag

SEQ ID NO: 10041 - DNA, 23 bp, Artificial Sequence
  human ApoB siRNA sequence
agtgtctccattcaccatagaga

SEQ ID NO: 10042 - DNA, 23 bp, Artificial Sequence
  human ApoB siRNA sequence
gtgtctccattcaccatagagat

SEQ ID NO: 10043 - DNA, 23 bp, Artificial Sequence
  human ApoB siRNA sequence
tgtctccattcaccatagagatg

SEQ ID NO: 10044 - DNA, 23 bp, Artificial Sequence
  human ApoB siRNA sequence
gtctccattcaccatagagatgt

SEQ ID NO: 10045 - DNA, 23 bp, Artificial Sequence
  human ApoB siRNA sequence
tctccattcaccatagagatgtc

SEQ ID NO: 10046 - DNA, 23 bp, Artificial Sequence
  human ApoB siRNA sequence
ctccattcaccatagagatgtcg

SEQ ID NO: 10047 - DNA, 23 bp, Artificial Sequence
  human ApoB siRNA sequence
tccattcaccatagagatgtcgg

SEQ ID NO: 10048 - DNA, 23 bp, Artificial Sequence
  human ApoB siRNA sequence
ccattcaccatagagatgtcggc

SEQ ID NO: 10049 - DNA, 23 bp, Artificial Sequence
  human ApoB siRNA sequence
cattcaccatagagatgtcggca

SEQ ID NO: 10050 - DNA, 23 bp, Artificial Sequence
  human ApoB siRNA sequence
attcaccatagagatgtcggcat

SEQ ID NO: 10051 - DNA, 23 bp, Artificial Sequence
  human ApoB siRNA sequence
ttcaccatagagatgtcggcatt

SEQ ID NO: 10052 - DNA, 23 bp, Artificial Sequence
  human ApoB siRNA sequence
tcaccatagagatgtcggcattc

SEQ ID NO: 10053 - DNA, 23 bp, Artificial Sequence
  human ApoB siRNA sequence
caccatagagatgtcggcattcg

SEQ ID NO: 10054 - DNA, 23 bp, Artificial Sequence
  human ApoB siRNA sequence
accatagagatgtcggcattcgg

SEQ ID NO: 10055 - DNA, 23 bp, Artificial Sequence
  human ApoB siRNA sequence
ccatagagatgtcggcattcggc

SEQ ID NO: 10056 - DNA, 23 bp, Artificial Sequence
  human ApoB siRNA sequence
catagagatgtcggcattcggct

SEQ ID NO: 10057 - DNA, 23 bp, Artificial Sequence
  human ApoB siRNA sequence
atagagatgtcggcattcggcta

SEQ ID NO: 10058 - DNA, 23 bp, Artificial Sequence
  human ApoB siRNA sequence
tagagatgtcggcattcggctat

SEQ ID NO: 10059 - DNA, 23 bp, Artificial Sequence
  human ApoB siRNA sequence
agagatgtcggcattcggctatg

SEQ ID NO: 10060 - DNA, 23 bp, Artificial Sequence
  human ApoB siRNA sequence
gagatgtcggcattcggctatgt

SEQ ID NO: 10061 - DNA, 23 bp, Artificial Sequence
  human ApoB siRNA sequence
agatgtcggcattcggctatgtg

SEQ ID NO: 10062 - DNA, 23 bp, Artificial Sequence
  human ApoB siRNA sequence
gatgtcggcattcggctatgtgt

SEQ ID NO: 10063 - DNA, 23 bp, Artificial Sequence
  human ApoB siRNA sequence
atgtcggcattcggctatgtgtt

SEQ ID NO: 10064 - DNA, 23 bp, Artificial Sequence
  human ApoB siRNA sequence
tgtcggcattcggctatgtgttc

SEQ ID NO: 10065 - DNA, 23 bp, Artificial Sequence
  human ApoB siRNA sequence
gtcggcattcggctatgtgttcc

SEQ ID NO: 10066 - DNA, 23 bp, Artificial Sequence
  human ApoB siRNA sequence
tcggcattcggctatgtgttccc

SEQ ID NO: 10067 - DNA, 23 bp, Artificial Sequence
  human ApoB siRNA sequence
cggcattcggctatgtgttccca

SEQ ID NO: 10068 - DNA, 23 bp, Artificial Sequence
  human ApoB siRNA sequence
ggcattcggctatgtgttcccaa

SEQ ID NO: 10069 - DNA, 23 bp, Artificial Sequence
  human ApoB siRNA sequence
gcattcggctatgtgttcccaaa

SEQ ID NO: 10070 - DNA, 23 bp, Artificial Sequence
  human ApoB siRNA sequence
cattcggctatgtgttcccaaaa

SEQ ID NO: 10071 - DNA, 23 bp, Artificial Sequence
  human ApoB siRNA sequence
attcggctatgtgttcccaaaag

SEQ ID NO: 10072 - DNA, 23 bp, Artificial Sequence
  human ApoB siRNA sequence
ttcggctatgtgttcccaaaagc

SEQ ID NO: 10073 - DNA, 23 bp, Artificial Sequence
  human ApoB siRNA sequence
tcggctatgtgttcccaaaagca

SEQ ID NO: 10074 - DNA, 23 bp, Artificial Sequence
  human ApoB siRNA sequence
cggctatgtgttcccaaaagcag

SEQ ID NO: 10075 - DNA, 23 bp, Artificial Sequence
  human ApoB siRNA sequence
ggctatgtgttcccaaaagcagt

SEQ ID NO: 10076 - DNA, 23 bp, Artificial Sequence
  human ApoB siRNA sequence
gctatgtgttcccaaaagcagtc

SEQ ID NO: 10077 - DNA, 23 bp, Artificial Sequence
  human ApoB siRNA sequence
ctatgtgttcccaaaagcagtca

SEQ ID NO: 10078 - DNA, 23 bp, Artificial Sequence
  human ApoB siRNA sequence
tatgtgttcccaaaagcagtcag

SEQ ID NO: 10079 - DNA, 23 bp, Artificial Sequence
  human ApoB siRNA sequence
atgtgttcccaaaagcagtcagc

SEQ ID NO: 10080 - DNA, 23 bp, Artificial Sequence
  human ApoB siRNA sequence
tgtgttcccaaaagcagtcagca

SEQ ID NO: 10081 - DNA, 23 bp, Artificial Sequence
  human ApoB siRNA sequence
gtgttcccaaaagcagtcagcat

SEQ ID NO: 10082 - DNA, 23 bp, Artificial Sequence
  human ApoB siRNA sequence
tgttcccaaaagcagtcagcatg

SEQ ID NO: 10083 - DNA, 23 bp, Artificial Sequence
  human ApoB siRNA sequence
gttcccaaaagcagtcagcatgc

SEQ ID NO: 10084 - DNA, 23 bp, Artificial Sequence
  human ApoB siRNA sequence
ttcccaaaagcagtcagcatgcc

SEQ ID NO: 10085 - DNA, 23 bp, Artificial Sequence
  human ApoB siRNA sequence
tcccaaaagcagtcagcatgcct

SEQ ID NO: 10086 - DNA, 23 bp, Artificial Sequence
  human ApoB siRNA sequence
cccaaaagcagtcagcatgccta

SEQ ID NO: 10087 - DNA, 23 bp, Artificial Sequence
  human ApoB siRNA sequence
ccaaaagcagtcagcatgcctag

SEQ ID NO: 10088 - DNA, 23 bp, Artificial Sequence
  human ApoB siRNA sequence
caaaagcagtcagcatgcctagt

SEQ ID NO: 10089 - DNA, 23 bp, Artificial Sequence
  human ApoB siRNA sequence
aaaagcagtcagcatgcctagtt

SEQ ID NO: 10090 - DNA, 23 bp, Artificial Sequence
  human ApoB siRNA sequence
aaagcagtcagcatgcctagttt

SEQ ID NO: 10091 - DNA, 23 bp, Artificial Sequence
  human ApoB siRNA sequence
aagcagtcagcatgcctagtttc

SEQ ID NO: 10092 - DNA, 23 bp, Artificial Sequence
  human ApoB siRNA sequence
agcagtcagcatgcctagtttct

SEQ ID NO: 10093 - DNA, 23 bp, Artificial Sequence
  human ApoB siRNA sequence
gcagtcagcatgcctagtttctc

SEQ ID NO: 10094 - DNA, 23 bp, Artificial Sequence
  human ApoB siRNA sequence
cagtcagcatgcctagtttctcc

SEQ ID NO: 10095 - DNA, 23 bp, Artificial Sequence
  human ApoB siRNA sequence
agtcagcatgcctagtttctcca

SEQ ID NO: 10096 - DNA, 23 bp, Artificial Sequence
  human ApoB siRNA sequence
gtcagcatgcctagtttctccat

SEQ ID NO: 10097 - DNA, 23 bp, Artificial Sequence
  human ApoB siRNA sequence
tcagcatgcctagtttctccatc

SEQ ID NO: 10098 - DNA, 23 bp, Artificial Sequence
  human ApoB siRNA sequence
cagcatgcctagtttctccatcc

SEQ ID NO: 10099 - DNA, 23 bp, Artificial Sequence
  human ApoB siRNA sequence
agcatgcctagtttctccatcct

SEQ ID NO: 10100 - DNA, 23 bp, Artificial Sequence
  human ApoB siRNA sequence
gcatgcctagtttctccatccta

SEQ ID NO: 10101 - DNA, 23 bp, Artificial Sequence
  human ApoB siRNA sequence
catgcctagtttctccatcctag

SEQ ID NO: 10102 - DNA, 23 bp, Artificial Sequence
  human ApoB siRNA sequence
atgcctagtttctccatcctagg

SEQ ID NO: 10103 - DNA, 23 bp, Artificial Sequence
  human ApoB siRNA sequence
tgcctagtttctccatcctaggt

SEQ ID NO: 10104 - DNA, 23 bp, Artificial Sequence
  human ApoB siRNA sequence
gcctagtttctccatcctaggtt

SEQ ID NO: 10105 - DNA, 23 bp, Artificial Sequence
  human ApoB siRNA sequence
cctagtttctccatcctaggttc

SEQ ID NO: 10106 - DNA, 23 bp, Artificial Sequence
  human ApoB siRNA sequence
ctagtttctccatcctaggttct

SEQ ID NO: 10107 - DNA, 23 bp, Artificial Sequence
  human ApoB siRNA sequence
tagtttctccatcctaggttctg

SEQ ID NO: 10108 - DNA, 23 bp, Artificial Sequence
  human ApoB siRNA sequence
agtttctccatcctaggttctga

SEQ ID NO: 10109 - DNA, 23 bp, Artificial Sequence
  human ApoB siRNA sequence
gtttctccatcctaggttctgac

SEQ ID NO: 10110 - DNA, 23 bp, Artificial Sequence
  human ApoB siRNA sequence
tttctccatcctaggttctgacg

SEQ ID NO: 10111 - DNA, 23 bp, Artificial Sequence
  human ApoB siRNA sequence
ttctccatcctaggttctgacgt

SEQ ID NO: 10112 - DNA, 23 bp, Artificial Sequence
  human ApoB siRNA sequence
tctccatcctaggttctgacgtc

SEQ ID NO: 10113 - DNA, 23 bp, Artificial Sequence
  human ApoB siRNA sequence
ctccatcctaggttctgacgtcc

SEQ ID NO: 10114 - DNA, 23 bp, Artificial Sequence
  human ApoB siRNA sequence
tccatcctaggttctgacgtccg

SEQ ID NO: 10115 - DNA, 23 bp, Artificial Sequence
  human ApoB siRNA sequence
ccatcctaggttctgacgtccgt

SEQ ID NO: 10116 - DNA, 23 bp, Artificial Sequence
  human ApoB siRNA sequence
catcctaggttctgacgtccgtg

SEQ ID NO: 10117 - DNA, 23 bp, Artificial Sequence
  human ApoB siRNA sequence
atcctaggttctgacgtccgtgt

SEQ ID NO: 10118 - DNA, 23 bp, Artificial Sequence
  human ApoB siRNA sequence
tcctaggttctgacgtccgtgtg

SEQ ID NO: 10119 - DNA, 23 bp, Artificial Sequence
  human ApoB siRNA sequence
cctaggttctgacgtccgtgtgc

SEQ ID NO: 10120 - DNA, 23 bp, Artificial Sequence
  human ApoB siRNA sequence
ctaggttctgacgtccgtgtgcc

SEQ ID NO: 10121 - DNA, 23 bp, Artificial Sequence
  human ApoB siRNA sequence
taggttctgacgtccgtgtgcct

SEQ ID NO: 10122 - DNA, 23 bp, Artificial Sequence
  human ApoB siRNA sequence
aggttctgacgtccgtgtgcctt

SEQ ID NO: 10123 - DNA, 23 bp, Artificial Sequence
  human ApoB siRNA sequence
ggttctgacgtccgtgtgccttc

SEQ ID NO: 10124 - DNA, 23 bp, Artificial Sequence
  human ApoB siRNA sequence
gttctgacgtccgtgtgccttca

SEQ ID NO: 10125 - DNA, 23 bp, Artificial Sequence
  human ApoB siRNA sequence
ttctgacgtccgtgtgccttcat

SEQ ID NO: 10126 - DNA, 23 bp, Artificial Sequence
  human ApoB siRNA sequence
tctgacgtccgtgtgccttcata

SEQ ID NO: 10127 - DNA, 23 bp, Artificial Sequence
  human ApoB siRNA sequence
ctgacgtccgtgtgccttcatac

SEQ ID NO: 10128 - DNA, 23 bp, Artificial Sequence
  human ApoB siRNA sequence
tgacgtccgtgtgccttcataca

SEQ ID NO: 10129 - DNA, 23 bp, Artificial Sequence
  human ApoB siRNA sequence
gacgtccgtgtgccttcatacac

SEQ ID NO: 10130 - DNA, 23 bp, Artificial Sequence
  human ApoB siRNA sequence
acgtccgtgtgccttcatacaca

SEQ ID NO: 10131 - DNA, 23 bp, Artificial Sequence
  human ApoB siRNA sequence
cgtccgtgtgccttcatacacat

SEQ ID NO: 10132 - DNA, 23 bp, Artificial Sequence
  human ApoB siRNA sequence
gtccgtgtgccttcatacacatt

SEQ ID NO: 10133 - DNA, 23 bp, Artificial Sequence
  human ApoB siRNA sequence
tccgtgtgccttcatacacatta

SEQ ID NO: 10134 - DNA, 23 bp, Artificial Sequence
  human ApoB siRNA sequence
ccgtgtgccttcatacacattaa

SEQ ID NO: 10135 - DNA, 23 bp, Artificial Sequence
  human ApoB siRNA sequence
cgtgtgccttcatacacattaat

SEQ ID NO: 10136 - DNA, 23 bp, Artificial Sequence
  human ApoB siRNA sequence
gtgtgccttcatacacattaatc

SEQ ID NO: 10137 - DNA, 23 bp, Artificial Sequence
  human ApoB siRNA sequence
tgtgccttcatacacattaatcc

SEQ ID NO: 10138 - DNA, 23 bp, Artificial Sequence
  human ApoB siRNA sequence
gtgccttcatacacattaatcct

SEQ ID NO: 10139 - DNA, 23 bp, Artificial Sequence
  human ApoB siRNA sequence
tgccttcatacacattaatcctg

SEQ ID NO: 10140 - DNA, 23 bp, Artificial Sequence
  human ApoB siRNA sequence
gccttcatacacattaatcctgc

SEQ ID NO: 10141 - DNA, 23 bp, Artificial Sequence
  human ApoB siRNA sequence
ccttcatacacattaatcctgcc

SEQ ID NO: 10142 - DNA, 23 bp, Artificial Sequence
  human ApoB siRNA sequence
cttcatacacattaatcctgcca

SEQ ID NO: 10143 - DNA, 23 bp, Artificial Sequence
  human ApoB siRNA sequence
ttcatacacattaatcctgccat

SEQ ID NO: 10144 - DNA, 23 bp, Artificial Sequence
  human ApoB siRNA sequence
tcatacacattaatcctgccatc

SEQ ID NO: 10145 - DNA, 23 bp, Artificial Sequence
  human ApoB siRNA sequence
catacacattaatcctgccatca

SEQ ID NO: 10146 - DNA, 23 bp, Artificial Sequence
  human ApoB siRNA sequence
atacacattaatcctgccatcat

SEQ ID NO: 10147 - DNA, 23 bp, Artificial Sequence
  human ApoB siRNA sequence
tacacattaatcctgccatcatt

SEQ ID NO: 10148 - DNA, 23 bp, Artificial Sequence
  human ApoB siRNA sequence
acacattaatcctgccatcatta

SEQ ID NO: 10149 - DNA, 23 bp, Artificial Sequence
  human ApoB siRNA sequence
cacattaatcctgccatcattag

SEQ ID NO: 10150 - DNA, 23 bp, Artificial Sequence
  human ApoB siRNA sequence
acattaatcctgccatcattaga

SEQ ID NO: 10151 - DNA, 23 bp, Artificial Sequence
  human ApoB siRNA sequence
cattaatcctgccatcattagag

SEQ ID NO: 10152 - DNA, 23 bp, Artificial Sequence
  human ApoB siRNA sequence
attaatcctgccatcattagagc

SEQ ID NO: 10153 - DNA, 23 bp, Artificial Sequence
  human ApoB siRNA sequence
ttaatcctgccatcattagagct

SEQ ID NO: 10154 - DNA, 23 bp, Artificial Sequence
  human ApoB siRNA sequence
taatcctgccatcattagagctg

SEQ ID NO: 10155 - DNA, 23 bp, Artificial Sequence
  human ApoB siRNA sequence
aatcctgccatcattagagctgc

SEQ ID NO: 10156 - DNA, 23 bp, Artificial Sequence
  human ApoB siRNA sequence
atcctgccatcattagagctgcc

SEQ ID NO: 10157 - DNA, 23 bp, Artificial Sequence
  human ApoB siRNA sequence
tcctgccatcattagagctgcca

SEQ ID NO: 10158 - DNA, 23 bp, Artificial Sequence
  human ApoB siRNA sequence
cctgccatcattagagctgccag

SEQ ID NO: 10159 - DNA, 23 bp, Artificial Sequence
  human ApoB siRNA sequence
ctgccatcattagagctgccagt

SEQ ID NO: 10160 - DNA, 23 bp, Artificial Sequence
  human ApoB siRNA sequence
tgccatcattagagctgccagtc

SEQ ID NO: 10161 - DNA, 23 bp, Artificial Sequence
  human ApoB siRNA sequence
gccatcattagagctgccagtcc

SEQ ID NO: 10162 - DNA, 23 bp, Artificial Sequence
  human ApoB siRNA sequence
ccatcattagagctgccagtcct

SEQ ID NO: 10163 - DNA, 23 bp, Artificial Sequence
  human ApoB siRNA sequence
catcattagagctgccagtcctt

SEQ ID NO: 10164 - DNA, 23 bp, Artificial Sequence
  human ApoB siRNA sequence
atcattagagctgccagtccttc

SEQ ID NO: 10165 - DNA, 23 bp, Artificial Sequence
  human ApoB siRNA sequence
tcattagagctgccagtccttca

SEQ ID NO: 10166 - DNA, 23 bp, Artificial Sequence
  human ApoB siRNA sequence
cattagagctgccagtccttcat

SEQ ID NO: 10167 - DNA, 23 bp, Artificial Sequence
  human ApoB siRNA sequence
attagagctgccagtccttcatg

SEQ ID NO: 10168 - DNA, 23 bp, Artificial Sequence
  human ApoB siRNA sequence
ttagagctgccagtccttcatgt

SEQ ID NO: 10169 - DNA, 23 bp, Artificial Sequence
  human ApoB siRNA sequence
tagagctgccagtccttcatgtc

SEQ ID NO: 10170 - DNA, 23 bp, Artificial Sequence
  human ApoB siRNA sequence
agagctgccagtccttcatgtcc

SEQ ID NO: 10171 - DNA, 23 bp, Artificial Sequence
  human ApoB siRNA sequence
gagctgccagtccttcatgtccc

SEQ ID NO: 10172 - DNA, 23 bp, Artificial Sequence
  human ApoB siRNA sequence
agctgccagtccttcatgtccct

SEQ ID NO: 10173 - DNA, 23 bp, Artificial Sequence
  human ApoB siRNA sequence
gctgccagtccttcatgtcccta

SEQ ID NO: 10174 - DNA, 23 bp, Artificial Sequence
  human ApoB siRNA sequence
ctgccagtccttcatgtccctag

SEQ ID NO: 10175 - DNA, 23 bp, Artificial Sequence
  human ApoB siRNA sequence
tgccagtccttcatgtccctaga

SEQ ID NO: 10176 - DNA, 23 bp, Artificial Sequence
  human ApoB siRNA sequence
gccagtccttcatgtccctagaa

SEQ ID NO: 10177 - DNA, 23 bp, Artificial Sequence
  human ApoB siRNA sequence
ccagtccttcatgtccctagaaa

SEQ ID NO: 10178 - DNA, 23 bp, Artificial Sequence
  human ApoB siRNA sequence
cagtccttcatgtccctagaaat

SEQ ID NO: 10179 - DNA, 23 bp, Artificial Sequence
  human ApoB siRNA sequence
agtccttcatgtccctagaaatc

SEQ ID NO: 10180 - DNA, 23 bp, Artificial Sequence
  human ApoB siRNA sequence
gtccttcatgtccctagaaatct

SEQ ID NO: 10181 - DNA, 23 bp, Artificial Sequence
  human ApoB siRNA sequence
tccttcatgtccctagaaatctc

SEQ ID NO: 10182 - DNA, 23 bp, Artificial Sequence
  human ApoB siRNA sequence
ccttcatgtccctagaaatctca

SEQ ID NO: 10183 - DNA, 23 bp, Artificial Sequence
  human ApoB siRNA sequence
cttcatgtccctagaaatctcaa

SEQ ID NO: 10184 - DNA, 23 bp, Artificial Sequence
  human ApoB siRNA sequence
ttcatgtccctagaaatctcaag

SEQ ID NO: 10185 - DNA, 23 bp, Artificial Sequence
  human ApoB siRNA sequence
tcatgtccctagaaatctcaagc

SEQ ID NO: 10186 - DNA, 23 bp, Artificial Sequence
  human ApoB siRNA sequence
catgtccctagaaatctcaagct

SEQ ID NO: 10187 - DNA, 23 bp, Artificial Sequence
  human ApoB siRNA sequence
atgtccctagaaatctcaagctt

SEQ ID NO: 10188 - DNA, 23 bp, Artificial Sequence
  human ApoB siRNA sequence
tgtccctagaaatctcaagcttt

SEQ ID NO: 10189 - DNA, 23 bp, Artificial Sequence
  human ApoB siRNA sequence
gtccctagaaatctcaagctttc

SEQ ID NO: 10190 - DNA, 23 bp, Artificial Sequence
  human ApoB siRNA sequence
tccctagaaatctcaagctttct

SEQ ID NO: 10191 - DNA, 23 bp, Artificial Sequence
  human ApoB siRNA sequence
ccctagaaatctcaagctttctc

SEQ ID NO: 10192 - DNA, 23 bp, Artificial Sequence
  human ApoB siRNA sequence
cctagaaatctcaagctttctct

SEQ ID NO: 10193 - DNA, 23 bp, Artificial Sequence
  human ApoB siRNA sequence
ctagaaatctcaagctttctctt

SEQ ID NO: 10194 - DNA, 23 bp, Artificial Sequence
  human ApoB siRNA sequence
tagaaatctcaagctttctcttc

SEQ ID NO: 10195 - DNA, 23 bp, Artificial Sequence
  human ApoB siRNA sequence
agaaatctcaagctttctcttcc

SEQ ID NO: 10196 - DNA, 23 bp, Artificial Sequence
  human ApoB siRNA sequence
gaaatctcaagctttctcttcca

SEQ ID NO: 10197 - DNA, 23 bp, Artificial Sequence
  human ApoB siRNA sequence
aaatctcaagctttctcttccac

SEQ ID NO: 10198 - DNA, 23 bp, Artificial Sequence
  human ApoB siRNA sequence
aatctcaagctttctcttccaca

SEQ ID NO: 10199 - DNA, 23 bp, Artificial Sequence
  human ApoB siRNA sequence
atctcaagctttctcttccacat

SEQ ID NO: 10200 - DNA, 23 bp, Artificial Sequence
  human ApoB siRNA sequence
tctcaagctttctcttccacatt

SEQ ID NO: 10201 - DNA, 23 bp, Artificial Sequence
  human ApoB siRNA sequence
ctcaagctttctcttccacattt

SEQ ID NO: 10202 - DNA, 23 bp, Artificial Sequence
  human ApoB siRNA sequence
tcaagctttctcttccacatttc

SEQ ID NO: 10203 - DNA, 23 bp, Artificial Sequence
  human ApoB siRNA sequence
caagctttctcttccacatttca

SEQ ID NO: 10204 - DNA, 23 bp, Artificial Sequence
  human ApoB siRNA sequence
aagctttctcttccacatttcaa

SEQ ID NO: 10205 - DNA, 23 bp, Artificial Sequence
  human ApoB siRNA sequence
agctttctcttccacatttcaag

SEQ ID NO: 10206 - DNA, 23 bp, Artificial Sequence
  human ApoB siRNA sequence
gctttctcttccacatttcaagg

SEQ ID NO: 10207 - DNA, 23 bp, Artificial Sequence
  human ApoB siRNA sequence
ctttctcttccacatttcaagga

SEQ ID NO: 10208 - DNA, 23 bp, Artificial Sequence
  human ApoB siRNA sequence
tttctcttccacatttcaaggaa

SEQ ID NO: 10209 - DNA, 23 bp, Artificial Sequence
  human ApoB siRNA sequence
ttctcttccacatttcaaggaat

SEQ ID NO: 10210 - DNA, 23 bp, Artificial Sequence
  human ApoB siRNA sequence
tctcttccacatttcaaggaatt

SEQ ID NO: 10211 - DNA, 23 bp, Artificial Sequence
  human ApoB siRNA sequence
ctcttccacatttcaaggaattg

SEQ ID NO: 10212 - DNA, 23 bp, Artificial Sequence
  human ApoB siRNA sequence
tcttccacatttcaaggaattgt

SEQ ID NO: 10213 - DNA, 23 bp, Artificial Sequence
  human ApoB siRNA sequence
cttccacatttcaaggaattgtg

SEQ ID NO: 10214 - DNA, 23 bp, Artificial Sequence
  human ApoB siRNA sequence
ttccacatttcaaggaattgtgt

SEQ ID NO: 10215 - DNA, 23 bp, Artificial Sequence
  human ApoB siRNA sequence
tccacatttcaaggaattgtgta

SEQ ID NO: 10216 - DNA, 23 bp, Artificial Sequence
  human ApoB siRNA sequence
ccacatttcaaggaattgtgtac

SEQ ID NO: 10217 - DNA, 23 bp, Artificial Sequence
  human ApoB siRNA sequence
cacatttcaaggaattgtgtacc

SEQ ID NO: 10218 - DNA, 23 bp, Artificial Sequence
  human ApoB siRNA sequence
acatttcaaggaattgtgtacca

SEQ ID NO: 10219 - DNA, 23 bp, Artificial Sequence
  human ApoB siRNA sequence
catttcaaggaattgtgtaccat

SEQ ID NO: 10220 - DNA, 23 bp, Artificial Sequence
  human ApoB siRNA sequence
atttcaaggaattgtgtaccata

SEQ ID NO: 10221 - DNA, 23 bp, Artificial Sequence
  human ApoB siRNA sequence
tttcaaggaattgtgtaccataa

SEQ ID NO: 10222 - DNA, 23 bp, Artificial Sequence
  human ApoB siRNA sequence
ttcaaggaattgtgtaccataag

SEQ ID NO: 10223 - DNA, 23 bp, Artificial Sequence
  human ApoB siRNA sequence
tcaaggaattgtgtaccataagc

SEQ ID NO: 10224 - DNA, 23 bp, Artificial Sequence
  human ApoB siRNA sequence
caaggaattgtgtaccataagcc

SEQ ID NO: 10225 - DNA, 23 bp, Artificial Sequence
  human ApoB siRNA sequence
aaggaattgtgtaccataagcca

SEQ ID NO: 10226 - DNA, 23 bp, Artificial Sequence
  human ApoB siRNA sequence
aggaattgtgtaccataagccat

SEQ ID NO: 10227 - DNA, 23 bp, Artificial Sequence
  human ApoB siRNA sequence
ggaattgtgtaccataagccata

SEQ ID NO: 10228 - DNA, 23 bp, Artificial Sequence
  human ApoB siRNA sequence
gaattgtgtaccataagccatat

SEQ ID NO: 10229 - DNA, 23 bp, Artificial Sequence
  human ApoB siRNA sequence
aattgtgtaccataagccatatt

SEQ ID NO: 10230 - DNA, 23 bp, Artificial Sequence
  human ApoB siRNA sequence
attgtgtaccataagccatattt

SEQ ID NO: 10231 - DNA, 23 bp, Artificial Sequence
  human ApoB siRNA sequence
ttgtgtaccataagccatatttt

SEQ ID NO: 10232 - DNA, 23 bp, Artificial Sequence
  human ApoB siRNA sequence
tgtgtaccataagccatattttt

SEQ ID NO: 10233 - DNA, 23 bp, Artificial Sequence
  human ApoB siRNA sequence
gtgtaccataagccatattttta

SEQ ID NO: 10234 - DNA, 23 bp, Artificial Sequence
  human ApoB siRNA sequence
tgtaccataagccatatttttat

SEQ ID NO: 10235 - DNA, 23 bp, Artificial Sequence
  human ApoB siRNA sequence
gtaccataagccatatttttatt

SEQ ID NO: 10236 - DNA, 23 bp, Artificial Sequence
  human ApoB siRNA sequence
taccataagccatatttttattc

SEQ ID NO: 10237 - DNA, 23 bp, Artificial Sequence
  human ApoB siRNA sequence
accataagccatatttttattcc

SEQ ID NO: 10238 - DNA, 23 bp, Artificial Sequence
  human ApoB siRNA sequence
ccataagccatatttttattcct

SEQ ID NO: 10239 - DNA, 23 bp, Artificial Sequence
  human ApoB siRNA sequence
cataagccatatttttattcctg

SEQ ID NO: 10240 - DNA, 23 bp, Artificial Sequence
  human ApoB siRNA sequence
ataagccatatttttattcctgc

SEQ ID NO: 10241 - DNA, 23 bp, Artificial Sequence
  human ApoB siRNA sequence
taagccatatttttattcctgcc

SEQ ID NO: 10242 - DNA, 23 bp, Artificial Sequence
  human ApoB siRNA sequence
aagccatatttttattcctgcca

SEQ ID NO: 10243 - DNA, 23 bp, Artificial Sequence
  human ApoB siRNA sequence
agccatatttttattcctgccat

SEQ ID NO: 10244 - DNA, 23 bp, Artificial Sequence
  human ApoB siRNA sequence
gccatatttttattcctgccatg

SEQ ID NO: 10245 - DNA, 23 bp, Artificial Sequence
  human ApoB siRNA sequence
ccatatttttattcctgccatgg

SEQ ID NO: 10246 - DNA, 23 bp, Artificial Sequence
  human ApoB siRNA sequence
catatttttattcctgccatggg

SEQ ID NO: 10247 - DNA, 23 bp, Artificial Sequence
  human ApoB siRNA sequence
atatttttattcctgccatgggc

SEQ ID NO: 10248 - DNA, 23 bp, Artificial Sequence
  human ApoB siRNA sequence
tatttttattcctgccatgggca

SEQ ID NO: 10249 - DNA, 23 bp, Artificial Sequence
  human ApoB siRNA sequence
atttttattcctgccatgggcaa

SEQ ID NO: 10250 - DNA, 23 bp, Artificial Sequence
  human ApoB siRNA sequence
tttttattcctgccatgggcaat

SEQ ID NO: 10251 - DNA, 23 bp, Artificial Sequence
  human ApoB siRNA sequence
ttttattcctgccatgggcaata

SEQ ID NO: 10252 - DNA, 23 bp, Artificial Sequence
  human ApoB siRNA sequence
tttattcctgccatgggcaatat

SEQ ID NO: 10253 - DNA, 23 bp, Artificial Sequence
  human ApoB siRNA sequence
ttattcctgccatgggcaatatt

SEQ ID NO: 10254 - DNA, 23 bp, Artificial Sequence
  human ApoB siRNA sequence
tattcctgccatgggcaatatta

SEQ ID NO: 10255 - DNA, 23 bp, Artificial Sequence
  human ApoB siRNA sequence
attcctgccatgggcaatattac

SEQ ID NO: 10256 - DNA, 23 bp, Artificial Sequence
  human ApoB siRNA sequence
ttcctgccatgggcaatattacc

SEQ ID NO: 10257 - DNA, 23 bp, Artificial Sequence
  human ApoB siRNA sequence
tcctgccatgggcaatattacct

SEQ ID NO: 10258 - DNA, 23 bp, Artificial Sequence
  human ApoB siRNA sequence
cctgccatgggcaatattaccta

SEQ ID NO: 10259 - DNA, 23 bp, Artificial Sequence
  human ApoB siRNA sequence
ctgccatgggcaatattacctat

SEQ ID NO: 10260 - DNA, 23 bp, Artificial Sequence
  human ApoB siRNA sequence
tgccatgggcaatattacctatg

SEQ ID NO: 10261 - DNA, 23 bp, Artificial Sequence
  human ApoB siRNA sequence
gccatgggcaatattacctatga

SEQ ID NO: 10262 - DNA, 23 bp, Artificial Sequence
  human ApoB siRNA sequence
ccatgggcaatattacctatgat

SEQ ID NO: 10263 - DNA, 23 bp, Artificial Sequence
  human ApoB siRNA sequence
catgggcaatattacctatgatt

SEQ ID NO: 10264 - DNA, 23 bp, Artificial Sequence
  human ApoB siRNA sequence
atgggcaatattacctatgattt

SEQ ID NO: 10265 - DNA, 23 bp, Artificial Sequence
  human ApoB siRNA sequence
tgggcaatattacctatgatttc

SEQ ID NO: 10266 - DNA, 23 bp, Artificial Sequence
  human ApoB siRNA sequence
gggcaatattacctatgatttct

SEQ ID NO: 10267 - DNA, 23 bp, Artificial Sequence
  human ApoB siRNA sequence
ggcaatattacctatgatttctc

SEQ ID NO: 10268 - DNA, 23 bp, Artificial Sequence
  human ApoB siRNA sequence
gcaatattacctatgatttctcc

SEQ ID NO: 10269 - DNA, 23 bp, Artificial Sequence
  human ApoB siRNA sequence
caatattacctatgatttctcct

SEQ ID NO: 10270 - DNA, 23 bp, Artificial Sequence
  human ApoB siRNA sequence
aatattacctatgatttctcctt

SEQ ID NO: 10271 - DNA, 23 bp, Artificial Sequence
  human ApoB siRNA sequence
atattacctatgatttctccttt

SEQ ID NO: 10272 - DNA, 23 bp, Artificial Sequence
  human ApoB siRNA sequence
tattacctatgatttctccttta

SEQ ID NO: 10273 - DNA, 23 bp, Artificial Sequence
  human ApoB siRNA sequence
attacctatgatttctcctttaa

SEQ ID NO: 10274 - DNA, 23 bp, Artificial Sequence
  human ApoB siRNA sequence
ttacctatgatttctcctttaaa

SEQ ID NO: 10275 - DNA, 23 bp, Artificial Sequence
  human ApoB siRNA sequence
tacctatgatttctcctttaaat

SEQ ID NO: 10276 - DNA, 23 bp, Artificial Sequence
  human ApoB siRNA sequence
acctatgatttctcctttaaatc

SEQ ID NO: 10277 - DNA, 23 bp, Artificial Sequence
  human ApoB siRNA sequence
cctatgatttctcctttaaatca

SEQ ID NO: 10278 - DNA, 23 bp, Artificial Sequence
  human ApoB siRNA sequence
ctatgatttctcctttaaatcaa

SEQ ID NO: 10279 - DNA, 23 bp, Artificial Sequence
  human ApoB siRNA sequence
tatgatttctcctttaaatcaag

SEQ ID NO: 10280 - DNA, 23 bp, Artificial Sequence
  human ApoB siRNA sequence
atgatttctcctttaaatcaagt

SEQ ID NO: 10281 - DNA, 23 bp, Artificial Sequence
  human ApoB siRNA sequence
tgatttctcctttaaatcaagtg

SEQ ID NO: 10282 - DNA, 23 bp, Artificial Sequence
  human ApoB siRNA sequence
gatttctcctttaaatcaagtgt

SEQ ID NO: 10283 - DNA, 23 bp, Artificial Sequence
  human ApoB siRNA sequence
atttctcctttaaatcaagtgtc

SEQ ID NO: 10284 - DNA, 23 bp, Artificial Sequence
  human ApoB siRNA sequence
tttctcctttaaatcaagtgtca

SEQ ID NO: 10285 - DNA, 23 bp, Artificial Sequence
  human ApoB siRNA sequence
ttctcctttaaatcaagtgtcat

SEQ ID NO: 10286 - DNA, 23 bp, Artificial Sequence
  human ApoB siRNA sequence
tctcctttaaatcaagtgtcatc

SEQ ID NO: 10287 - DNA, 23 bp, Artificial Sequence
  human ApoB siRNA sequence
ctcctttaaatcaagtgtcatca

SEQ ID NO: 10288 - DNA, 23 bp, Artificial Sequence
  human ApoB siRNA sequence
tcctttaaatcaagtgtcatcac

SEQ ID NO: 10289 - DNA, 23 bp, Artificial Sequence
  human ApoB siRNA sequence
cctttaaatcaagtgtcatcaca

SEQ ID NO: 10290 - DNA, 23 bp, Artificial Sequence
  human ApoB siRNA sequence
ctttaaatcaagtgtcatcacac

SEQ ID NO: 10291 - DNA, 23 bp, Artificial Sequence
  human ApoB siRNA sequence
tttaaatcaagtgtcatcacact

SEQ ID NO: 10292 - DNA, 23 bp, Artificial Sequence
  human ApoB siRNA sequence
ttaaatcaagtgtcatcacactg

SEQ ID NO: 10293 - DNA, 23 bp, Artificial Sequence
  human ApoB siRNA sequence
taaatcaagtgtcatcacactga

SEQ ID NO: 10294 - DNA, 23 bp, Artificial Sequence
  human ApoB siRNA sequence
aaatcaagtgtcatcacactgaa

SEQ ID NO: 10295 - DNA, 23 bp, Artificial Sequence
  human ApoB siRNA sequence
aatcaagtgtcatcacactgaat

SEQ ID NO: 10296 - DNA, 23 bp, Artificial Sequence
  human ApoB siRNA sequence
atcaagtgtcatcacactgaata

SEQ ID NO: 10297 - DNA, 23 bp, Artificial Sequence
  human ApoB siRNA sequence
tcaagtgtcatcacactgaatac

SEQ ID NO: 10298 - DNA, 23 bp, Artificial Sequence
  human ApoB siRNA sequence
caagtgtcatcacactgaatacc

SEQ ID NO: 10299 - DNA, 23 bp, Artificial Sequence
  human ApoB siRNA sequence
aagtgtcatcacactgaatacca

SEQ ID NO: 10300 - DNA, 23 bp, Artificial Sequence
  human ApoB siRNA sequence
agtgtcatcacactgaataccaa

SEQ ID NO: 10301 - DNA, 23 bp, Artificial Sequence
  human ApoB siRNA sequence
gtgtcatcacactgaataccaat

SEQ ID NO: 10302 - DNA, 23 bp, Artificial Sequence
  human ApoB siRNA sequence
tgtcatcacactgaataccaatg

SEQ ID NO: 10303 - DNA, 23 bp, Artificial Sequence
  human ApoB siRNA sequence
gtcatcacactgaataccaatgc

SEQ ID NO: 10304 - DNA, 23 bp, Artificial Sequence
  human ApoB siRNA sequence
tcatcacactgaataccaatgct

SEQ ID NO: 10305 - DNA, 23 bp, Artificial Sequence
  human ApoB siRNA sequence
catcacactgaataccaatgctg

SEQ ID NO: 10306 - DNA, 23 bp, Artificial Sequence
  human ApoB siRNA sequence
atcacactgaataccaatgctga

SEQ ID NO: 10307 - DNA, 23 bp, Artificial Sequence
  human ApoB siRNA sequence
tcacactgaataccaatgctgaa

SEQ ID NO: 10308 - DNA, 23 bp, Artificial Sequence
  human ApoB siRNA sequence
cacactgaataccaatgctgaac

SEQ ID NO: 10309 - DNA, 23 bp, Artificial Sequence
  human ApoB siRNA sequence
acactgaataccaatgctgaact

SEQ ID NO: 10310 - DNA, 23 bp, Artificial Sequence
  human ApoB siRNA sequence
cactgaataccaatgctgaactt

SEQ ID NO: 10311 - DNA, 23 bp, Artificial Sequence
  human ApoB siRNA sequence
actgaataccaatgctgaacttt

SEQ ID NO: 10312 - DNA, 23 bp, Artificial Sequence
  human ApoB siRNA sequence
ctgaataccaatgctgaactttt

SEQ ID NO: 10313 - DNA, 23 bp, Artificial Sequence
  human ApoB siRNA sequence
tgaataccaatgctgaacttttt

SEQ ID NO: 10314 - DNA, 23 bp, Artificial Sequence
  human ApoB siRNA sequence
gaataccaatgctgaacttttta

SEQ ID NO: 10315 - DNA, 23 bp, Artificial Sequence
  human ApoB siRNA sequence
aataccaatgctgaactttttaa

SEQ ID NO: 10316 - DNA, 23 bp, Artificial Sequence
  human ApoB siRNA sequence
ataccaatgctgaactttttaac

SEQ ID NO: 10317 - DNA, 23 bp, Artificial Sequence
  human ApoB siRNA sequence
taccaatgctgaactttttaacc

SEQ ID NO: 10318 - DNA, 23 bp, Artificial Sequence
  human ApoB siRNA sequence
accaatgctgaactttttaacca

SEQ ID NO: 10319 - DNA, 23 bp, Artificial Sequence
  human ApoB siRNA sequence
ccaatgctgaactttttaaccag

SEQ ID NO: 10320 - DNA, 23 bp, Artificial Sequence
  human ApoB siRNA sequence
caatgctgaactttttaaccagt

SEQ ID NO: 10321 - DNA, 23 bp, Artificial Sequence
  human ApoB siRNA sequence
aatgctgaactttttaaccagtc

SEQ ID NO: 10322 - DNA, 23 bp, Artificial Sequence
  human ApoB siRNA sequence
atgctgaactttttaaccagtca

SEQ ID NO: 10323 - DNA, 23 bp, Artificial Sequence
  human ApoB siRNA sequence
tgctgaactttttaaccagtcag

SEQ ID NO: 10324 - DNA, 23 bp, Artificial Sequence
  human ApoB siRNA sequence
gctgaactttttaaccagtcaga

SEQ ID NO: 10325 - DNA, 23 bp, Artificial Sequence
  human ApoB siRNA sequence
ctgaactttttaaccagtcagat

SEQ ID NO: 10326 - DNA, 23 bp, Artificial Sequence
  human ApoB siRNA sequence
tgaactttttaaccagtcagata

SEQ ID NO: 10327 - DNA, 23 bp, Artificial Sequence
  human ApoB siRNA sequence
gaactttttaaccagtcagatat

SEQ ID NO: 10328 - DNA, 23 bp, Artificial Sequence
  human ApoB siRNA sequence
aactttttaaccagtcagatatt

SEQ ID NO: 10329 - DNA, 23 bp, Artificial Sequence
  human ApoB siRNA sequence
actttttaaccagtcagatattg

SEQ ID NO: 10330 - DNA, 23 bp, Artificial Sequence
  human ApoB siRNA sequence
ctttttaaccagtcagatattgt

SEQ ID NO: 10331 - DNA, 23 bp, Artificial Sequence
  human ApoB siRNA sequence
tttttaaccagtcagatattgtt

SEQ ID NO: 10332 - DNA, 23 bp, Artificial Sequence
  human ApoB siRNA sequence
ttttaaccagtcagatattgttg

SEQ ID NO: 10333 - DNA, 23 bp, Artificial Sequence
  human ApoB siRNA sequence
tttaaccagtcagatattgttgc

SEQ ID NO: 10334 - DNA, 23 bp, Artificial Sequence
  human ApoB siRNA sequence
ttaaccagtcagatattgttgct

SEQ ID NO: 10335 - DNA, 23 bp, Artificial Sequence
  human ApoB siRNA sequence
taaccagtcagatattgttgctc

SEQ ID NO: 10336 - DNA, 23 bp, Artificial Sequence
  human ApoB siRNA sequence
aaccagtcagatattgttgctca

SEQ ID NO: 10337 - DNA, 23 bp, Artificial Sequence
  human ApoB siRNA sequence
accagtcagatattgttgctcat

SEQ ID NO: 10338 - DNA, 23 bp, Artificial Sequence
  human ApoB siRNA sequence
ccagtcagatattgttgctcatc

SEQ ID NO: 10339 - DNA, 23 bp, Artificial Sequence
  human ApoB siRNA sequence
cagtcagatattgttgctcatct

SEQ ID NO: 10340 - DNA, 23 bp, Artificial Sequence
  human ApoB siRNA sequence
agtcagatattgttgctcatctc

SEQ ID NO: 10341 - DNA, 23 bp, Artificial Sequence
  human ApoB siRNA sequence
gtcagatattgttgctcatctcc

SEQ ID NO: 10342 - DNA, 23 bp, Artificial Sequence
  human ApoB siRNA sequence
tcagatattgttgctcatctcct

SEQ ID NO: 10343 - DNA, 23 bp, Artificial Sequence
  human ApoB siRNA sequence
cagatattgttgctcatctcctt

SEQ ID NO: 10344 - DNA, 23 bp, Artificial Sequence
  human ApoB siRNA sequence
agatattgttgctcatctccttt

SEQ ID NO: 10345 - DNA, 23 bp, Artificial Sequence
  human ApoB siRNA sequence
gatattgttgctcatctcctttc

SEQ ID NO: 10346 - DNA, 23 bp, Artificial Sequence
  human ApoB siRNA sequence
atattgttgctcatctcctttct

SEQ ID NO: 10347 - DNA, 23 bp, Artificial Sequence
  human ApoB siRNA sequence
tattgttgctcatctcctttctt

SEQ ID NO: 10348 - DNA, 23 bp, Artificial Sequence
  human ApoB siRNA sequence
attgttgctcatctcctttcttc

SEQ ID NO: 10349 - DNA, 23 bp, Artificial Sequence
  human ApoB siRNA sequence
ttgttgctcatctcctttcttca

SEQ ID NO: 10350 - DNA, 23 bp, Artificial Sequence
  human ApoB siRNA sequence
tgttgctcatctcctttcttcat

SEQ ID NO: 10351 - DNA, 23 bp, Artificial Sequence
  human ApoB siRNA sequence
gttgctcatctcctttcttcatc

SEQ ID NO: 10352 - DNA, 23 bp, Artificial Sequence
  human ApoB siRNA sequence
ttgctcatctcctttcttcatct

SEQ ID NO: 10353 - DNA, 23 bp, Artificial Sequence
  human ApoB siRNA sequence
tgctcatctcctttcttcatctt

SEQ ID NO: 10354 - DNA, 23 bp, Artificial Sequence
  human ApoB siRNA sequence
gctcatctcctttcttcatcttc

SEQ ID NO: 10355 - DNA, 23 bp, Artificial Sequence
  human ApoB siRNA sequence
ctcatctcctttcttcatcttca

SEQ ID NO: 10356 - DNA, 23 bp, Artificial Sequence
  human ApoB siRNA sequence
tcatctcctttcttcatcttcat

SEQ ID NO: 10357 - DNA, 23 bp, Artificial Sequence
  human ApoB siRNA sequence
catctcctttcttcatcttcatc

SEQ ID NO: 10358 - DNA, 23 bp, Artificial Sequence
  human ApoB siRNA sequence
atctcctttcttcatcttcatct

SEQ ID NO: 10359 - DNA, 23 bp, Artificial Sequence
  human ApoB siRNA sequence
tctcctttcttcatcttcatctg

SEQ ID NO: 10360 - DNA, 23 bp, Artificial Sequence
  human ApoB siRNA sequence
ctcctttcttcatcttcatctgt

SEQ ID NO: 10361 - DNA, 23 bp, Artificial Sequence
  human ApoB siRNA sequence
tcctttcttcatcttcatctgtc

SEQ ID NO: 10362 - DNA, 23 bp, Artificial Sequence
  human ApoB siRNA sequence
cctttcttcatcttcatctgtca

SEQ ID NO: 10363 - DNA, 23 bp, Artificial Sequence
  human ApoB siRNA sequence
ctttcttcatcttcatctgtcat

SEQ ID NO: 10364 - DNA, 23 bp, Artificial Sequence
  human ApoB siRNA sequence
tttcttcatcttcatctgtcatt

SEQ ID NO: 10365 - DNA, 23 bp, Artificial Sequence
  human ApoB siRNA sequence
ttcttcatcttcatctgtcattg

SEQ ID NO: 10366 - DNA, 23 bp, Artificial Sequence
  human ApoB siRNA sequence
tcttcatcttcatctgtcattga

SEQ ID NO: 10367 - DNA, 23 bp, Artificial Sequence
  human ApoB siRNA sequence
cttcatcttcatctgtcattgat

SEQ ID NO: 10368 - DNA, 23 bp, Artificial Sequence
  human ApoB siRNA sequence
ttcatcttcatctgtcattgatg

SEQ ID NO: 10369 - DNA, 23 bp, Artificial Sequence
  human ApoB siRNA sequence
tcatcttcatctgtcattgatgc

SEQ ID NO: 10370 - DNA, 23 bp, Artificial Sequence
  human ApoB siRNA sequence
catcttcatctgtcattgatgca

SEQ ID NO: 10371 - DNA, 23 bp, Artificial Sequence
  human ApoB siRNA sequence
atcttcatctgtcattgatgcac

SEQ ID NO: 10372 - DNA, 23 bp, Artificial Sequence
  human ApoB siRNA sequence
tcttcatctgtcattgatgcact

SEQ ID NO: 10373 - DNA, 23 bp, Artificial Sequence
  human ApoB siRNA sequence
cttcatctgtcattgatgcactg

SEQ ID NO: 10374 - DNA, 23 bp, Artificial Sequence
  human ApoB siRNA sequence
ttcatctgtcattgatgcactgc

SEQ ID NO: 10375 - DNA, 23 bp, Artificial Sequence
  human ApoB siRNA sequence
tcatctgtcattgatgcactgca

SEQ ID NO: 10376 - DNA, 23 bp, Artificial Sequence
  human ApoB siRNA sequence
catctgtcattgatgcactgcag

SEQ ID NO: 10377 - DNA, 23 bp, Artificial Sequence
  human ApoB siRNA sequence
atctgtcattgatgcactgcagt

SEQ ID NO: 10378 - DNA, 23 bp, Artificial Sequence
  human ApoB siRNA sequence
tctgtcattgatgcactgcagta

SEQ ID NO: 10379 - DNA, 23 bp, Artificial Sequence
  human ApoB siRNA sequence
ctgtcattgatgcactgcagtac

SEQ ID NO: 10380 - DNA, 23 bp, Artificial Sequence
  human ApoB siRNA sequence
tgtcattgatgcactgcagtaca

SEQ ID NO: 10381 - DNA, 23 bp, Artificial Sequence
  human ApoB siRNA sequence
gtcattgatgcactgcagtacaa

SEQ ID NO: 10382 - DNA, 23 bp, Artificial Sequence
  human ApoB siRNA sequence
tcattgatgcactgcagtacaaa

SEQ ID NO: 10383 - DNA, 23 bp, Artificial Sequence
  human ApoB siRNA sequence
cattgatgcactgcagtacaaat

SEQ ID NO: 10384 - DNA, 23 bp, Artificial Sequence
  human ApoB siRNA sequence
attgatgcactgcagtacaaatt

SEQ ID NO: 10385 - DNA, 23 bp, Artificial Sequence
  human ApoB siRNA sequence
ttgatgcactgcagtacaaatta

SEQ ID NO: 10386 - DNA, 23 bp, Artificial Sequence
  human ApoB siRNA sequence
tgatgcactgcagtacaaattag

SEQ ID NO: 10387 - DNA, 23 bp, Artificial Sequence
  human ApoB siRNA sequence
gatgcactgcagtacaaattaga

SEQ ID NO: 10388 - DNA, 23 bp, Artificial Sequence
  human ApoB siRNA sequence
atgcactgcagtacaaattagag

SEQ ID NO: 10389 - DNA, 23 bp, Artificial Sequence
  human ApoB siRNA sequence
tgcactgcagtacaaattagagg

SEQ ID NO: 10390 - DNA, 23 bp, Artificial Sequence
  human ApoB siRNA sequence
gcactgcagtacaaattagaggg

SEQ ID NO: 10391 - DNA, 23 bp, Artificial Sequence
  human ApoB siRNA sequence
cactgcagtacaaattagagggc

SEQ ID NO: 10392 - DNA, 23 bp, Artificial Sequence
  human ApoB siRNA sequence
actgcagtacaaattagagggca

SEQ ID NO: 10393 - DNA, 23 bp, Artificial Sequence
  human ApoB siRNA sequence
ctgcagtacaaattagagggcac

SEQ ID NO: 10394 - DNA, 23 bp, Artificial Sequence
  human ApoB siRNA sequence
tgcagtacaaattagagggcacc

SEQ ID NO: 10395 - DNA, 23 bp, Artificial Sequence
  human ApoB siRNA sequence
gcagtacaaattagagggcacca

SEQ ID NO: 10396 - DNA, 23 bp, Artificial Sequence
  human ApoB siRNA sequence
cagtacaaattagagggcaccac

SEQ ID NO: 10397 - DNA, 23 bp, Artificial Sequence
  human ApoB siRNA sequence
agtacaaattagagggcaccaca

SEQ ID NO: 10398 - DNA, 23 bp, Artificial Sequence
  human ApoB siRNA sequence
gtacaaattagagggcaccacaa

SEQ ID NO: 10399 - DNA, 23 bp, Artificial Sequence
  human ApoB siRNA sequence
tacaaattagagggcaccacaag

SEQ ID NO: 10400 - DNA, 23 bp, Artificial Sequence
  human ApoB siRNA sequence
acaaattagagggcaccacaaga

SEQ ID NO: 10401 - DNA, 23 bp, Artificial Sequence
  human ApoB siRNA sequence
caaattagagggcaccacaagat

SEQ ID NO: 10402 - DNA, 23 bp, Artificial Sequence
  human ApoB siRNA sequence
aaattagagggcaccacaagatt

SEQ ID NO: 10403 - DNA, 23 bp, Artificial Sequence
  human ApoB siRNA sequence
aattagagggcaccacaagattg

SEQ ID NO: 10404 - DNA, 23 bp, Artificial Sequence
  human ApoB siRNA sequence
attagagggcaccacaagattga

SEQ ID NO: 10405 - DNA, 23 bp, Artificial Sequence
  human ApoB siRNA sequence
ttagagggcaccacaagattgac

SEQ ID NO: 10406 - DNA, 23 bp, Artificial Sequence
  human ApoB siRNA sequence
tagagggcaccacaagattgaca

SEQ ID NO: 10407 - DNA, 23 bp, Artificial Sequence
  human ApoB siRNA sequence
agagggcaccacaagattgacaa

SEQ ID NO: 10408 - DNA, 23 bp, Artificial Sequence
  human ApoB siRNA sequence
gagggcaccacaagattgacaag

SEQ ID NO: 10409 - DNA, 23 bp, Artificial Sequence
  human ApoB siRNA sequence
agggcaccacaagattgacaaga

SEQ ID NO: 10410 - DNA, 23 bp, Artificial Sequence
  human ApoB siRNA sequence
gggcaccacaagattgacaagaa

SEQ ID NO: 10411 - DNA, 23 bp, Artificial Sequence
  human ApoB siRNA sequence
ggcaccacaagattgacaagaaa

SEQ ID NO: 10412 - DNA, 23 bp, Artificial Sequence
  human ApoB siRNA sequence
gcaccacaagattgacaagaaaa

SEQ ID NO: 10413 - DNA, 23 bp, Artificial Sequence
  human ApoB siRNA sequence
caccacaagattgacaagaaaaa

SEQ ID NO: 10414 - DNA, 23 bp, Artificial Sequence
  human ApoB siRNA sequence
accacaagattgacaagaaaaag

SEQ ID NO: 10415 - DNA, 23 bp, Artificial Sequence
  human ApoB siRNA sequence
ccacaagattgacaagaaaaagg

SEQ ID NO: 10416 - DNA, 23 bp, Artificial Sequence
  human ApoB siRNA sequence
cacaagattgacaagaaaaaggg

SEQ ID NO: 10417 - DNA, 23 bp, Artificial Sequence
  human ApoB siRNA sequence
acaagattgacaagaaaaagggg

SEQ ID NO: 10418 - DNA, 23 bp, Artificial Sequence
  human ApoB siRNA sequence
caagattgacaagaaaaagggga

SEQ ID NO: 10419 - DNA, 23 bp, Artificial Sequence
  human ApoB siRNA sequence
aagattgacaagaaaaaggggat

SEQ ID NO: 10420 - DNA, 23 bp, Artificial Sequence
  human ApoB siRNA sequence
agattgacaagaaaaaggggatt

SEQ ID NO: 10421 - DNA, 23 bp, Artificial Sequence
  human ApoB siRNA sequence
gattgacaagaaaaaggggattg

SEQ ID NO: 10422 - DNA, 23 bp, Artificial Sequence
  human ApoB siRNA sequence
attgacaagaaaaaggggattga

SEQ ID NO: 10423 - DNA, 23 bp, Artificial Sequence
  human ApoB siRNA sequence
ttgacaagaaaaaggggattgaa

SEQ ID NO: 10424 - DNA, 23 bp, Artificial Sequence
  human ApoB siRNA sequence
tgacaagaaaaaggggattgaag

SEQ ID NO: 10425 - DNA, 23 bp, Artificial Sequence
  human ApoB siRNA sequence
gacaagaaaaaggggattgaagt

SEQ ID NO: 10426 - DNA, 23 bp, Artificial Sequence
  human ApoB siRNA sequence
acaagaaaaaggggattgaagtt

SEQ ID NO: 10427 - DNA, 23 bp, Artificial Sequence
  human ApoB siRNA sequence
caagaaaaaggggattgaagtta

SEQ ID NO: 10428 - DNA, 23 bp, Artificial Sequence
  human ApoB siRNA sequence
aagaaaaaggggattgaagttag

SEQ ID NO: 10429 - DNA, 23 bp, Artificial Sequence
  human ApoB siRNA sequence
agaaaaaggggattgaagttagc

SEQ ID NO: 10430 - DNA, 23 bp, Artificial Sequence
  human ApoB siRNA sequence
gaaaaaggggattgaagttagcc

SEQ ID NO: 10431 - DNA, 23 bp, Artificial Sequence
  human ApoB siRNA sequence
aaaaaggggattgaagttagcca

SEQ ID NO: 10432 - DNA, 23 bp, Artificial Sequence
  human ApoB siRNA sequence
aaaaggggattgaagttagccac

SEQ ID NO: 10433 - DNA, 23 bp, Artificial Sequence
  human ApoB siRNA sequence
aaaggggattgaagttagccaca

SEQ ID NO: 10434 - DNA, 23 bp, Artificial Sequence
  human ApoB siRNA sequence
aaggggattgaagttagccacag

SEQ ID NO: 10435 - DNA, 23 bp, Artificial Sequence
  human ApoB siRNA sequence
aggggattgaagttagccacagc

SEQ ID NO: 10436 - DNA, 23 bp, Artificial Sequence
  human ApoB siRNA sequence
ggggattgaagttagccacagct

SEQ ID NO: 10437 - DNA, 23 bp, Artificial Sequence
  human ApoB siRNA sequence
gggattgaagttagccacagctc

SEQ ID NO: 10438 - DNA, 23 bp, Artificial Sequence
  human ApoB siRNA sequence
ggattgaagttagccacagctct

SEQ ID NO: 10439 - DNA, 23 bp, Artificial Sequence
  human ApoB siRNA sequence
gattgaagttagccacagctctg

SEQ ID NO: 10440 - DNA, 23 bp, Artificial Sequence
  human ApoB siRNA sequence
attgaagttagccacagctctgt

SEQ ID NO: 10441 - DNA, 23 bp, Artificial Sequence
  human ApoB siRNA sequence
ttgaagttagccacagctctgtc

SEQ ID NO: 10442 - DNA, 23 bp, Artificial Sequence
  human ApoB siRNA sequence
tgaagttagccacagctctgtct

SEQ ID NO: 10443 - DNA, 23 bp, Artificial Sequence
  human ApoB siRNA sequence
gaagttagccacagctctgtctc

SEQ ID NO: 10444 - DNA, 23 bp, Artificial Sequence
  human ApoB siRNA sequence
aagttagccacagctctgtctct

SEQ ID NO: 10445 - DNA, 23 bp, Artificial Sequence
  human ApoB siRNA sequence
agttagccacagctctgtctctg

SEQ ID NO: 10446 - DNA, 23 bp, Artificial Sequence
  human ApoB siRNA sequence
gttagccacagctctgtctctga

SEQ ID NO: 10447 - DNA, 23 bp, Artificial Sequence
  human ApoB siRNA sequence
ttagccacagctctgtctctgag

SEQ ID NO: 10448 - DNA, 23 bp, Artificial Sequence
  human ApoB siRNA sequence
tagccacagctctgtctctgagc

SEQ ID NO: 10449 - DNA, 23 bp, Artificial Sequence
  human ApoB siRNA sequence
agccacagctctgtctctgagca

SEQ ID NO: 10450 - DNA, 23 bp, Artificial Sequence
  human ApoB siRNA sequence
gccacagctctgtctctgagcaa

SEQ ID NO: 10451 - DNA, 23 bp, Artificial Sequence
  human ApoB siRNA sequence
ccacagctctgtctctgagcaac

SEQ ID NO: 10452 - DNA, 23 bp, Artificial Sequence
  human ApoB siRNA sequence
cacagctctgtctctgagcaaca

SEQ ID NO: 10453 - DNA, 23 bp, Artificial Sequence
  human ApoB siRNA sequence
acagctctgtctctgagcaacaa

SEQ ID NO: 10454 - DNA, 23 bp, Artificial Sequence
  human ApoB siRNA sequence
cagctctgtctctgagcaacaaa

SEQ ID NO: 10455 - DNA, 23 bp, Artificial Sequence
  human ApoB siRNA sequence
agctctgtctctgagcaacaaat

SEQ ID NO: 10456 - DNA, 23 bp, Artificial Sequence
  human ApoB siRNA sequence
gctctgtctctgagcaacaaatt

SEQ ID NO: 10457 - DNA, 23 bp, Artificial Sequence
  human ApoB siRNA sequence
ctctgtctctgagcaacaaattt

SEQ ID NO: 10458 - DNA, 23 bp, Artificial Sequence
  human ApoB siRNA sequence
tctgtctctgagcaacaaatttg

SEQ ID NO: 10459 - DNA, 23 bp, Artificial Sequence
  human ApoB siRNA sequence
ctgtctctgagcaacaaatttgt

SEQ ID NO: 10460 - DNA, 23 bp, Artificial Sequence
  human ApoB siRNA sequence
tgtctctgagcaacaaatttgtg

SEQ ID NO: 10461 - DNA, 23 bp, Artificial Sequence
  human ApoB siRNA sequence
gtctctgagcaacaaatttgtgg

SEQ ID NO: 10462 - DNA, 23 bp, Artificial Sequence
  human ApoB siRNA sequence
tctctgagcaacaaatttgtgga

SEQ ID NO: 10463 - DNA, 23 bp, Artificial Sequence
  human ApoB siRNA sequence
ctctgagcaacaaatttgtggag

SEQ ID NO: 10464 - DNA, 23 bp, Artificial Sequence
  human ApoB siRNA sequence
tctgagcaacaaatttgtggagg

SEQ ID NO: 10465 - DNA, 23 bp, Artificial Sequence
  human ApoB siRNA sequence
ctgagcaacaaatttgtggaggg

SEQ ID NO: 10466 - DNA, 23 bp, Artificial Sequence
  human ApoB siRNA sequence
tgagcaacaaatttgtggagggt

SEQ ID NO: 10467 - DNA, 23 bp, Artificial Sequence
  human ApoB siRNA sequence
gagcaacaaatttgtggagggta

SEQ ID NO: 10468 - DNA, 23 bp, Artificial Sequence
  human ApoB siRNA sequence
agcaacaaatttgtggagggtag

SEQ ID NO: 10469 - DNA, 23 bp, Artificial Sequence
  human ApoB siRNA sequence
gcaacaaatttgtggagggtagt

SEQ ID NO: 10470 - DNA, 23 bp, Artificial Sequence
  human ApoB siRNA sequence
caacaaatttgtggagggtagtc

SEQ ID NO: 10471 - DNA, 23 bp, Artificial Sequence
  human ApoB siRNA sequence
aacaaatttgtggagggtagtca

SEQ ID NO: 10472 - DNA, 23 bp, Artificial Sequence
  human ApoB siRNA sequence
acaaatttgtggagggtagtcat

SEQ ID NO: 10473 - DNA, 23 bp, Artificial Sequence
  human ApoB siRNA sequence
caaatttgtggagggtagtcata

SEQ ID NO: 10474 - DNA, 23 bp, Artificial Sequence
  human ApoB siRNA sequence
aaatttgtggagggtagtcataa

SEQ ID NO: 10475 - DNA, 23 bp, Artificial Sequence
  human ApoB siRNA sequence
aatttgtggagggtagtcataac

SEQ ID NO: 10476 - DNA, 23 bp, Artificial Sequence
  human ApoB siRNA sequence
atttgtggagggtagtcataaca

SEQ ID NO: 10477 - DNA, 23 bp, Artificial Sequence
  human ApoB siRNA sequence
tttgtggagggtagtcataacag

SEQ ID NO: 10478 - DNA, 23 bp, Artificial Sequence
  human ApoB siRNA sequence
ttgtggagggtagtcataacagt

SEQ ID NO: 10479 - DNA, 23 bp, Artificial Sequence
  human ApoB siRNA sequence
tgtggagggtagtcataacagta

SEQ ID NO: 10480 - DNA, 23 bp, Artificial Sequence
  human ApoB siRNA sequence
gtggagggtagtcataacagtac

SEQ ID NO: 10481 - DNA, 23 bp, Artificial Sequence
  human ApoB siRNA sequence
tggagggtagtcataacagtact

SEQ ID NO: 10482 - DNA, 23 bp, Artificial Sequence
  human ApoB siRNA sequence
ggagggtagtcataacagtactg

SEQ ID NO: 10483 - DNA, 23 bp, Artificial Sequence
  human ApoB siRNA sequence
gagggtagtcataacagtactgt

SEQ ID NO: 10484 - DNA, 23 bp, Artificial Sequence
  human ApoB siRNA sequence
agggtagtcataacagtactgtg

SEQ ID NO: 10485 - DNA, 23 bp, Artificial Sequence
  human ApoB siRNA sequence
gggtagtcataacagtactgtga

SEQ ID NO: 10486 - DNA, 23 bp, Artificial Sequence
  human ApoB siRNA sequence
ggtagtcataacagtactgtgag

SEQ ID NO: 10487 - DNA, 23 bp, Artificial Sequence
  human ApoB siRNA sequence
gtagtcataacagtactgtgagc

SEQ ID NO: 10488 - DNA, 23 bp, Artificial Sequence
  human ApoB siRNA sequence
tagtcataacagtactgtgagct

SEQ ID NO: 10489 - DNA, 23 bp, Artificial Sequence
  human ApoB siRNA sequence
agtcataacagtactgtgagctt

SEQ ID NO: 10490 - DNA, 23 bp, Artificial Sequence
  human ApoB siRNA sequence
gtcataacagtactgtgagctta

SEQ ID NO: 10491 - DNA, 23 bp, Artificial Sequence
  human ApoB siRNA sequence
tcataacagtactgtgagcttaa

SEQ ID NO: 10492 - DNA, 23 bp, Artificial Sequence
  human ApoB siRNA sequence
cataacagtactgtgagcttaac

SEQ ID NO: 10493 - DNA, 23 bp, Artificial Sequence
  human ApoB siRNA sequence
ataacagtactgtgagcttaacc

SEQ ID NO: 10494 - DNA, 23 bp, Artificial Sequence
  human ApoB siRNA sequence
taacagtactgtgagcttaacca

SEQ ID NO: 10495 - DNA, 23 bp, Artificial Sequence
  human ApoB siRNA sequence
aacagtactgtgagcttaaccac

SEQ ID NO: 10496 - DNA, 23 bp, Artificial Sequence
  human ApoB siRNA sequence
acagtactgtgagcttaaccacg

SEQ ID NO: 10497 - DNA, 23 bp, Artificial Sequence
  human ApoB siRNA sequence
cagtactgtgagcttaaccacga

SEQ ID NO: 10498 - DNA, 23 bp, Artificial Sequence
  human ApoB siRNA sequence
agtactgtgagcttaaccacgaa

SEQ ID NO: 10499 - DNA, 23 bp, Artificial Sequence
  human ApoB siRNA sequence
gtactgtgagcttaaccacgaaa

SEQ ID NO: 10500 - DNA, 23 bp, Artificial Sequence
  human ApoB siRNA sequence
tactgtgagcttaaccacgaaaa

SEQ ID NO: 10501 - DNA, 23 bp, Artificial Sequence
  human ApoB siRNA sequence
actgtgagcttaaccacgaaaaa

SEQ ID NO: 10502 - DNA, 23 bp, Artificial Sequence
  human ApoB siRNA sequence
ctgtgagcttaaccacgaaaaat

SEQ ID NO: 10503 - DNA, 23 bp, Artificial Sequence
  human ApoB siRNA sequence
tgtgagcttaaccacgaaaaata

SEQ ID NO: 10504 - DNA, 23 bp, Artificial Sequence
  human ApoB siRNA sequence
gtgagcttaaccacgaaaaatat

SEQ ID NO: 10505 - DNA, 23 bp, Artificial Sequence
  human ApoB siRNA sequence
tgagcttaaccacgaaaaatatg

SEQ ID NO: 10506 - DNA, 23 bp, Artificial Sequence
  human ApoB siRNA sequence
gagcttaaccacgaaaaatatgg

SEQ ID NO: 10507 - DNA, 23 bp, Artificial Sequence
  human ApoB siRNA sequence
agcttaaccacgaaaaatatgga

SEQ ID NO: 10508 - DNA, 23 bp, Artificial Sequence
  human ApoB siRNA sequence
gcttaaccacgaaaaatatggaa

SEQ ID NO: 10509 - DNA, 23 bp, Artificial Sequence
  human ApoB siRNA sequence
cttaaccacgaaaaatatggaag

SEQ ID NO: 10510 - DNA, 23 bp, Artificial Sequence
  human ApoB siRNA sequence
ttaaccacgaaaaatatggaagt

SEQ ID NO: 10511 - DNA, 23 bp, Artificial Sequence
  human ApoB siRNA sequence
taaccacgaaaaatatggaagtg

SEQ ID NO: 10512 - DNA, 23 bp, Artificial Sequence
  human ApoB siRNA sequence
aaccacgaaaaatatggaagtgt

SEQ ID NO: 10513 - DNA, 23 bp, Artificial Sequence
  human ApoB siRNA sequence
accacgaaaaatatggaagtgtc

SEQ ID NO: 10514 - DNA, 23 bp, Artificial Sequence
  human ApoB siRNA sequence
ccacgaaaaatatggaagtgtca

SEQ ID NO: 10515 - DNA, 23 bp, Artificial Sequence
  human ApoB siRNA sequence
cacgaaaaatatggaagtgtcag

SEQ ID NO: 10516 - DNA, 23 bp, Artificial Sequence
  human ApoB siRNA sequence
acgaaaaatatggaagtgtcagt

SEQ ID NO: 10517 - DNA, 23 bp, Artificial Sequence
  human ApoB siRNA sequence
cgaaaaatatggaagtgtcagtg

SEQ ID NO: 10518 - DNA, 23 bp, Artificial Sequence
  human ApoB siRNA sequence
gaaaaatatggaagtgtcagtgg

SEQ ID NO: 10519 - DNA, 23 bp, Artificial Sequence
  human ApoB siRNA sequence
aaaaatatggaagtgtcagtggc

SEQ ID NO: 10520 - DNA, 23 bp, Artificial Sequence
  human ApoB siRNA sequence
aaaatatggaagtgtcagtggca

SEQ ID NO: 10521 - DNA, 23 bp, Artificial Sequence
  human ApoB siRNA sequence
aaatatggaagtgtcagtggcaa

SEQ ID NO: 10522 - DNA, 23 bp, Artificial Sequence
  human ApoB siRNA sequence
aatatggaagtgtcagtggcaaa

SEQ ID NO: 10523 - DNA, 23 bp, Artificial Sequence
  human ApoB siRNA sequence
atatggaagtgtcagtggcaaaa

SEQ ID NO: 10524 - DNA, 23 bp, Artificial Sequence
  human ApoB siRNA sequence
tatggaagtgtcagtggcaaaaa

SEQ ID NO: 10525 - DNA, 23 bp, Artificial Sequence
  human ApoB siRNA sequence
atggaagtgtcagtggcaaaaac

SEQ ID NO: 10526 - DNA, 23 bp, Artificial Sequence
  human ApoB siRNA sequence
tggaagtgtcagtggcaaaaacc

SEQ ID NO: 10527 - DNA, 23 bp, Artificial Sequence
  human ApoB siRNA sequence
ggaagtgtcagtggcaaaaacca

SEQ ID NO: 10528 - DNA, 23 bp, Artificial Sequence
  human ApoB siRNA sequence
gaagtgtcagtggcaaaaaccac

SEQ ID NO: 10529 - DNA, 23 bp, Artificial Sequence
  human ApoB siRNA sequence
aagtgtcagtggcaaaaaccaca

SEQ ID NO: 10530 - DNA, 23 bp, Artificial Sequence
  human ApoB siRNA sequence
agtgtcagtggcaaaaaccacaa

SEQ ID NO: 10531 - DNA, 23 bp, Artificial Sequence
  human ApoB siRNA sequence
gtgtcagtggcaaaaaccacaaa

SEQ ID NO: 10532 - DNA, 23 bp, Artificial Sequence
  human ApoB siRNA sequence
tgtcagtggcaaaaaccacaaaa

SEQ ID NO: 10533 - DNA, 23 bp, Artificial Sequence
  human ApoB siRNA sequence
gtcagtggcaaaaaccacaaaag

SEQ ID NO: 10534 - DNA, 23 bp, Artificial Sequence
  human ApoB siRNA sequence
tcagtggcaaaaaccacaaaagc

SEQ ID NO: 10535 - DNA, 23 bp, Artificial Sequence
  human ApoB siRNA sequence
cagtggcaaaaaccacaaaagcc

SEQ ID NO: 10536 - DNA, 23 bp, Artificial Sequence
  human ApoB siRNA sequence
agtggcaaaaaccacaaaagccg

SEQ ID NO: 10537 - DNA, 23 bp, Artificial Sequence
  human ApoB siRNA sequence
gtggcaaaaaccacaaaagccga

SEQ ID NO: 10538 - DNA, 23 bp, Artificial Sequence
  human ApoB siRNA sequence
tggcaaaaaccacaaaagccgaa

SEQ ID NO: 10539 - DNA, 23 bp, Artificial Sequence
  human ApoB siRNA sequence
ggcaaaaaccacaaaagccgaaa

SEQ ID NO: 10540 - DNA, 23 bp, Artificial Sequence
  human ApoB siRNA sequence
gcaaaaaccacaaaagccgaaat

SEQ ID NO: 10541 - DNA, 23 bp, Artificial Sequence
  human ApoB siRNA sequence
caaaaaccacaaaagccgaaatt

SEQ ID NO: 10542 - DNA, 23 bp, Artificial Sequence
  human ApoB siRNA sequence
aaaaaccacaaaagccgaaattc

SEQ ID NO: 10543 - DNA, 23 bp, Artificial Sequence
  human ApoB siRNA sequence
aaaaccacaaaagccgaaattcc

SEQ ID NO: 10544 - DNA, 23 bp, Artificial Sequence
  human ApoB siRNA sequence
aaaccacaaaagccgaaattcca

SEQ ID NO: 10545 - DNA, 23 bp, Artificial Sequence
  human ApoB siRNA sequence
aaccacaaaagccgaaattccaa

SEQ ID NO: 10546 - DNA, 23 bp, Artificial Sequence
  human ApoB siRNA sequence
accacaaaagccgaaattccaat

SEQ ID NO: 10547 - DNA, 23 bp, Artificial Sequence
  human ApoB siRNA sequence
ccacaaaagccgaaattccaatt

SEQ ID NO: 10548 - DNA, 23 bp, Artificial Sequence
  human ApoB siRNA sequence
cacaaaagccgaaattccaattt

SEQ ID NO: 10549 - DNA, 23 bp, Artificial Sequence
  human ApoB siRNA sequence
acaaaagccgaaattccaatttt

SEQ ID NO: 10550 - DNA, 23 bp, Artificial Sequence
  human ApoB siRNA sequence
caaaagccgaaattccaattttg

SEQ ID NO: 10551 - DNA, 23 bp, Artificial Sequence
  human ApoB siRNA sequence
aaaagccgaaattccaattttga

SEQ ID NO: 10552 - DNA, 23 bp, Artificial Sequence
  human ApoB siRNA sequence
aaagccgaaattccaattttgag

SEQ ID NO: 10553 - DNA, 23 bp, Artificial Sequence
  human ApoB siRNA sequence
aagccgaaattccaattttgaga

SEQ ID NO: 10554 - DNA, 23 bp, Artificial Sequence
  human ApoB siRNA sequence
agccgaaattccaattttgagaa

SEQ ID NO: 10555 - DNA, 23 bp, Artificial Sequence
  human ApoB siRNA sequence
gccgaaattccaattttgagaat

SEQ ID NO: 10556 - DNA, 23 bp, Artificial Sequence
  human ApoB siRNA sequence
ccgaaattccaattttgagaatg

SEQ ID NO: 10557 - DNA, 23 bp, Artificial Sequence
  human ApoB siRNA sequence
cgaaattccaattttgagaatga

SEQ ID NO: 10558 - DNA, 23 bp, Artificial Sequence
  human ApoB siRNA sequence
gaaattccaattttgagaatgaa

SEQ ID NO: 10559 - DNA, 23 bp, Artificial Sequence
  human ApoB siRNA sequence
aaattccaattttgagaatgaat

SEQ ID NO: 10560 - DNA, 23 bp, Artificial Sequence
  human ApoB siRNA sequence
aattccaattttgagaatgaatt

SEQ ID NO: 10561 - DNA, 23 bp, Artificial Sequence
  human ApoB siRNA sequence
attccaattttgagaatgaattt

SEQ ID NO: 10562 - DNA, 23 bp, Artificial Sequence
  human ApoB siRNA sequence
ttccaattttgagaatgaatttc

SEQ ID NO: 10563 - DNA, 23 bp, Artificial Sequence
  human ApoB siRNA sequence
tccaattttgagaatgaatttca

SEQ ID NO: 10564 - DNA, 23 bp, Artificial Sequence
  human ApoB siRNA sequence
ccaattttgagaatgaatttcaa

SEQ ID NO: 10565 - DNA, 23 bp, Artificial Sequence
  human ApoB siRNA sequence
caattttgagaatgaatttcaag

SEQ ID NO: 10566 - DNA, 23 bp, Artificial Sequence
  human ApoB siRNA sequence
aattttgagaatgaatttcaagc

SEQ ID NO: 10567 - DNA, 23 bp, Artificial Sequence
  human ApoB siRNA sequence
attttgagaatgaatttcaagca

SEQ ID NO: 10568 - DNA, 23 bp, Artificial Sequence
  human ApoB siRNA sequence
ttttgagaatgaatttcaagcaa

SEQ ID NO: 10569 - DNA, 23 bp, Artificial Sequence
  human ApoB siRNA sequence
tttgagaatgaatttcaagcaag

SEQ ID NO: 10570 - DNA, 23 bp, Artificial Sequence
  human ApoB siRNA sequence
ttgagaatgaatttcaagcaaga

SEQ ID NO: 10571 - DNA, 23 bp, Artificial Sequence
  human ApoB siRNA sequence
tgagaatgaatttcaagcaagaa

SEQ ID NO: 10572 - DNA, 23 bp, Artificial Sequence
  human ApoB siRNA sequence
gagaatgaatttcaagcaagaac

SEQ ID NO: 10573 - DNA, 23 bp, Artificial Sequence
  human ApoB siRNA sequence
agaatgaatttcaagcaagaact

SEQ ID NO: 10574 - DNA, 23 bp, Artificial Sequence
  human ApoB siRNA sequence
gaatgaatttcaagcaagaactt

SEQ ID NO: 10575 - DNA, 23 bp, Artificial Sequence
  human ApoB siRNA sequence
aatgaatttcaagcaagaactta

SEQ ID NO: 10576 - DNA, 23 bp, Artificial Sequence
  human ApoB siRNA sequence
atgaatttcaagcaagaacttaa

SEQ ID NO: 10577 - DNA, 23 bp, Artificial Sequence
  human ApoB siRNA sequence
tgaatttcaagcaagaacttaat

SEQ ID NO: 10578 - DNA, 23 bp, Artificial Sequence
  human ApoB siRNA sequence
gaatttcaagcaagaacttaatg

SEQ ID NO: 10579 - DNA, 23 bp, Artificial Sequence
  human ApoB siRNA sequence
aatttcaagcaagaacttaatgg

SEQ ID NO: 10580 - DNA, 23 bp, Artificial Sequence
  human ApoB siRNA sequence
atttcaagcaagaacttaatgga

SEQ ID NO: 10581 - DNA, 23 bp, Artificial Sequence
  human ApoB siRNA sequence
tttcaagcaagaacttaatggaa

SEQ ID NO: 10582 - DNA, 23 bp, Artificial Sequence
  human ApoB siRNA sequence
ttcaagcaagaacttaatggaaa

SEQ ID NO: 10583 - DNA, 23 bp, Artificial Sequence
  human ApoB siRNA sequence
tcaagcaagaacttaatggaaat

SEQ ID NO: 10584 - DNA, 23 bp, Artificial Sequence
  human ApoB siRNA sequence
caagcaagaacttaatggaaata

SEQ ID NO: 10585 - DNA, 23 bp, Artificial Sequence
  human ApoB siRNA sequence
aagcaagaacttaatggaaatac

SEQ ID NO: 10586 - DNA, 23 bp, Artificial Sequence
  human ApoB siRNA sequence
agcaagaacttaatggaaatacc

SEQ ID NO: 10587 - DNA, 23 bp, Artificial Sequence
  human ApoB siRNA sequence
gcaagaacttaatggaaatacca

SEQ ID NO: 10588 - DNA, 23 bp, Artificial Sequence
  human ApoB siRNA sequence
caagaacttaatggaaataccaa

SEQ ID NO: 10589 - DNA, 23 bp, Artificial Sequence
  human ApoB siRNA sequence
aagaacttaatggaaataccaag

SEQ ID NO: 10590 - DNA, 23 bp, Artificial Sequence
  human ApoB siRNA sequence
agaacttaatggaaataccaagt

SEQ ID NO: 10591 - DNA, 23 bp, Artificial Sequence
  human ApoB siRNA sequence
gaacttaatggaaataccaagtc

SEQ ID NO: 10592 - DNA, 23 bp, Artificial Sequence
  human ApoB siRNA sequence
aacttaatggaaataccaagtca

SEQ ID NO: 10593 - DNA, 23 bp, Artificial Sequence
  human ApoB siRNA sequence
acttaatggaaataccaagtcaa

SEQ ID NO: 10594 - DNA, 23 bp, Artificial Sequence
  human ApoB siRNA sequence
cttaatggaaataccaagtcaaa

SEQ ID NO: 10595 - DNA, 23 bp, Artificial Sequence
  human ApoB siRNA sequence
ttaatggaaataccaagtcaaaa

SEQ ID NO: 10596 - DNA, 23 bp, Artificial Sequence
  human ApoB siRNA sequence
taatggaaataccaagtcaaaac

SEQ ID NO: 10597 - DNA, 23 bp, Artificial Sequence
  human ApoB siRNA sequence
aatggaaataccaagtcaaaacc

SEQ ID NO: 10598 - DNA, 23 bp, Artificial Sequence
  human ApoB siRNA sequence
atggaaataccaagtcaaaacct

SEQ ID NO: 10599 - DNA, 23 bp, Artificial Sequence
  human ApoB siRNA sequence
tggaaataccaagtcaaaaccta

SEQ ID NO: 10600 - DNA, 23 bp, Artificial Sequence
  human ApoB siRNA sequence
ggaaataccaagtcaaaacctac

SEQ ID NO: 10601 - DNA, 23 bp, Artificial Sequence
  human ApoB siRNA sequence
gaaataccaagtcaaaacctact

SEQ ID NO: 10602 - DNA, 23 bp, Artificial Sequence
  human ApoB siRNA sequence
aaataccaagtcaaaacctactg

SEQ ID NO: 10603 - DNA, 23 bp, Artificial Sequence
  human ApoB siRNA sequence
aataccaagtcaaaacctactgt

SEQ ID NO: 10604 - DNA, 23 bp, Artificial Sequence
  human ApoB siRNA sequence
ataccaagtcaaaacctactgtc

SEQ ID NO: 10605 - DNA, 23 bp, Artificial Sequence
  human ApoB siRNA sequence
taccaagtcaaaacctactgtct

SEQ ID NO: 10606 - DNA, 23 bp, Artificial Sequence
  human ApoB siRNA sequence
accaagtcaaaacctactgtctc

SEQ ID NO: 10607 - DNA, 23 bp, Artificial Sequence
  human ApoB siRNA sequence
ccaagtcaaaacctactgtctct

SEQ ID NO: 10608 - DNA, 23 bp, Artificial Sequence
  human ApoB siRNA sequence
caagtcaaaacctactgtctctt

SEQ ID NO: 10609 - DNA, 23 bp, Artificial Sequence
  human ApoB siRNA sequence
aagtcaaaacctactgtctcttc

SEQ ID NO: 10610 - DNA, 23 bp, Artificial Sequence
  human ApoB siRNA sequence
agtcaaaacctactgtctcttcc

SEQ ID NO: 10611 - DNA, 23 bp, Artificial Sequence
  human ApoB siRNA sequence
gtcaaaacctactgtctcttcct

SEQ ID NO: 10612 - DNA, 23 bp, Artificial Sequence
  human ApoB siRNA sequence
tcaaaacctactgtctcttcctc

SEQ ID NO: 10613 - DNA, 23 bp, Artificial Sequence
  human ApoB siRNA sequence
caaaacctactgtctcttcctcc

SEQ ID NO: 10614 - DNA, 23 bp, Artificial Sequence
  human ApoB siRNA sequence
aaaacctactgtctcttcctcca

SEQ ID NO: 10615 - DNA, 23 bp, Artificial Sequence
  human ApoB siRNA sequence
aaacctactgtctcttcctccat

SEQ ID NO: 10616 - DNA, 23 bp, Artificial Sequence
  human ApoB siRNA sequence
aacctactgtctcttcctccatg

SEQ ID NO: 10617 - DNA, 23 bp, Artificial Sequence
  human ApoB siRNA sequence
acctactgtctcttcctccatgg

SEQ ID NO: 10618 - DNA, 23 bp, Artificial Sequence
  human ApoB siRNA sequence
cctactgtctcttcctccatgga

SEQ ID NO: 10619 - DNA, 23 bp, Artificial Sequence
  human ApoB siRNA sequence
ctactgtctcttcctccatggaa

SEQ ID NO: 10620 - DNA, 23 bp, Artificial Sequence
  human ApoB siRNA sequence
tactgtctcttcctccatggaat

SEQ ID NO: 10621 - DNA, 23 bp, Artificial Sequence
  human ApoB siRNA sequence
actgtctcttcctccatggaatt

SEQ ID NO: 10622 - DNA, 23 bp, Artificial Sequence
  human ApoB siRNA sequence
ctgtctcttcctccatggaattt

SEQ ID NO: 10623 - DNA, 23 bp, Artificial Sequence
  human ApoB siRNA sequence
tgtctcttcctccatggaattta

SEQ ID NO: 10624 - DNA, 23 bp, Artificial Sequence
  human ApoB siRNA sequence
gtctcttcctccatggaatttaa

SEQ ID NO: 10625 - DNA, 23 bp, Artificial Sequence
  human ApoB siRNA sequence
tctcttcctccatggaatttaag

SEQ ID NO: 10626 - DNA, 23 bp, Artificial Sequence
  human ApoB siRNA sequence
ctcttcctccatggaatttaagt

SEQ ID NO: 10627 - DNA, 23 bp, Artificial Sequence
  human ApoB siRNA sequence
tcttcctccatggaatttaagta

SEQ ID NO: 10628 - DNA, 23 bp, Artificial Sequence
  human ApoB siRNA sequence
cttcctccatggaatttaagtat

SEQ ID NO: 10629 - DNA, 23 bp, Artificial Sequence
  human ApoB siRNA sequence
ttcctccatggaatttaagtatg

SEQ ID NO: 10630 - DNA, 23 bp, Artificial Sequence
  human ApoB siRNA sequence
tcctccatggaatttaagtatga

SEQ ID NO: 10631 - DNA, 23 bp, Artificial Sequence
  human ApoB siRNA sequence
cctccatggaatttaagtatgat

SEQ ID NO: 10632 - DNA, 23 bp, Artificial Sequence
  human ApoB siRNA sequence
ctccatggaatttaagtatgatt

SEQ ID NO: 10633 - DNA, 23 bp, Artificial Sequence
  human ApoB siRNA sequence
tccatggaatttaagtatgattt

SEQ ID NO: 10634 - DNA, 23 bp, Artificial Sequence
  human ApoB siRNA sequence
ccatggaatttaagtatgatttc

SEQ ID NO: 10635 - DNA, 23 bp, Artificial Sequence
  human ApoB siRNA sequence
catggaatttaagtatgatttca

SEQ ID NO: 10636 - DNA, 23 bp, Artificial Sequence
  human ApoB siRNA sequence
atggaatttaagtatgatttcaa

SEQ ID NO: 10637 - DNA, 23 bp, Artificial Sequence
  human ApoB siRNA sequence
tggaatttaagtatgatttcaat

SEQ ID NO: 10638 - DNA, 23 bp, Artificial Sequence
  human ApoB siRNA sequence
ggaatttaagtatgatttcaatt

SEQ ID NO: 10639 - DNA, 23 bp, Artificial Sequence
  human ApoB siRNA sequence
gaatttaagtatgatttcaattc

SEQ ID NO: 10640 - DNA, 23 bp, Artificial Sequence
  human ApoB siRNA sequence
aatttaagtatgatttcaattct

SEQ ID NO: 10641 - DNA, 23 bp, Artificial Sequence
  human ApoB siRNA sequence
atttaagtatgatttcaattctt

SEQ ID NO: 10642 - DNA, 23 bp, Artificial Sequence
  human ApoB siRNA sequence
tttaagtatgatttcaattcttc

SEQ ID NO: 10643 - DNA, 23 bp, Artificial Sequence
  human ApoB siRNA sequence
ttaagtatgatttcaattcttca

SEQ ID NO: 10644 - DNA, 23 bp, Artificial Sequence
  human ApoB siRNA sequence
taagtatgatttcaattcttcaa

SEQ ID NO: 10645 - DNA, 23 bp, Artificial Sequence
  human ApoB siRNA sequence
aagtatgatttcaattcttcaat

SEQ ID NO: 10646 - DNA, 23 bp, Artificial Sequence
  human ApoB siRNA sequence
agtatgatttcaattcttcaatg

SEQ ID NO: 10647 - DNA, 23 bp, Artificial Sequence
  human ApoB siRNA sequence
gtatgatttcaattcttcaatgc

SEQ ID NO: 10648 - DNA, 23 bp, Artificial Sequence
  human ApoB siRNA sequence
tatgatttcaattcttcaatgct

SEQ ID NO: 10649 - DNA, 23 bp, Artificial Sequence
  human ApoB siRNA sequence
atgatttcaattcttcaatgctg

SEQ ID NO: 10650 - DNA, 23 bp, Artificial Sequence
  human ApoB siRNA sequence
tgatttcaattcttcaatgctgt

SEQ ID NO: 10651 - DNA, 23 bp, Artificial Sequence
  human ApoB siRNA sequence
gatttcaattcttcaatgctgta

SEQ ID NO: 10652 - DNA, 23 bp, Artificial Sequence
  human ApoB siRNA sequence
atttcaattcttcaatgctgtac

SEQ ID NO: 10653 - DNA, 23 bp, Artificial Sequence
  human ApoB siRNA sequence
tttcaattcttcaatgctgtact

SEQ ID NO: 10654 - DNA, 23 bp, Artificial Sequence
  human ApoB siRNA sequence
ttcaattcttcaatgctgtactc

SEQ ID NO: 10655 - DNA, 23 bp, Artificial Sequence
  human ApoB siRNA sequence
tcaattcttcaatgctgtactct

SEQ ID NO: 10656 - DNA, 23 bp, Artificial Sequence
  human ApoB siRNA sequence
caattcttcaatgctgtactcta

SEQ ID NO: 10657 - DNA, 23 bp, Artificial Sequence
  human ApoB siRNA sequence
aattcttcaatgctgtactctac

SEQ ID NO: 10658 - DNA, 23 bp, Artificial Sequence
  human ApoB siRNA sequence
attcttcaatgctgtactctacc

SEQ ID NO: 10659 - DNA, 23 bp, Artificial Sequence
  human ApoB siRNA sequence
ttcttcaatgctgtactctaccg

SEQ ID NO: 10660 - DNA, 23 bp, Artificial Sequence
  human ApoB siRNA sequence
tcttcaatgctgtactctaccgc

SEQ ID NO: 10661 - DNA, 23 bp, Artificial Sequence
  human ApoB siRNA sequence
cttcaatgctgtactctaccgct

SEQ ID NO: 10662 - DNA, 23 bp, Artificial Sequence
  human ApoB siRNA sequence
ttcaatgctgtactctaccgcta

SEQ ID NO: 10663 - DNA, 23 bp, Artificial Sequence
  human ApoB siRNA sequence
tcaatgctgtactctaccgctaa

SEQ ID NO: 10664 - DNA, 23 bp, Artificial Sequence
  human ApoB siRNA sequence
caatgctgtactctaccgctaaa

SEQ ID NO: 10665 - DNA, 23 bp, Artificial Sequence
  human ApoB siRNA sequence
aatgctgtactctaccgctaaag

SEQ ID NO: 10666 - DNA, 23 bp, Artificial Sequence
  human ApoB siRNA sequence
atgctgtactctaccgctaaagg

SEQ ID NO: 10667 - DNA, 23 bp, Artificial Sequence
  human ApoB siRNA sequence
tgctgtactctaccgctaaagga

SEQ ID NO: 10668 - DNA, 23 bp, Artificial Sequence
  human ApoB siRNA sequence
gctgtactctaccgctaaaggag

SEQ ID NO: 10669 - DNA, 23 bp, Artificial Sequence
  human ApoB siRNA sequence
ctgtactctaccgctaaaggagc

SEQ ID NO: 10670 - DNA, 23 bp, Artificial Sequence
  human ApoB siRNA sequence
tgtactctaccgctaaaggagca

SEQ ID NO: 10671 - DNA, 23 bp, Artificial Sequence
  human ApoB siRNA sequence
gtactctaccgctaaaggagcag

SEQ ID NO: 10672 - DNA, 23 bp, Artificial Sequence
  human ApoB siRNA sequence
tactctaccgctaaaggagcagt

SEQ ID NO: 10673 - DNA, 23 bp, Artificial Sequence
  human ApoB siRNA sequence
actctaccgctaaaggagcagtt

SEQ ID NO: 10674 - DNA, 23 bp, Artificial Sequence
  human ApoB siRNA sequence
ctctaccgctaaaggagcagttg

SEQ ID NO: 10675 - DNA, 23 bp, Artificial Sequence
  human ApoB siRNA sequence
tctaccgctaaaggagcagttga

SEQ ID NO: 10676 - DNA, 23 bp, Artificial Sequence
  human ApoB siRNA sequence
ctaccgctaaaggagcagttgac

SEQ ID NO: 10677 - DNA, 23 bp, Artificial Sequence
  human ApoB siRNA sequence
taccgctaaaggagcagttgacc

SEQ ID NO: 10678 - DNA, 23 bp, Artificial Sequence
  human ApoB siRNA sequence
accgctaaaggagcagttgacca

SEQ ID NO: 10679 - DNA, 23 bp, Artificial Sequence
  human ApoB siRNA sequence
ccgctaaaggagcagttgaccac

SEQ ID NO: 10680 - DNA, 23 bp, Artificial Sequence
  human ApoB siRNA sequence
cgctaaaggagcagttgaccaca

SEQ ID NO: 10681 - DNA, 23 bp, Artificial Sequence
  human ApoB siRNA sequence
gctaaaggagcagttgaccacaa

SEQ ID NO: 10682 - DNA, 23 bp, Artificial Sequence
  human ApoB siRNA sequence
ctaaaggagcagttgaccacaag

SEQ ID NO: 10683 - DNA, 23 bp, Artificial Sequence
  human ApoB siRNA sequence
taaaggagcagttgaccacaagc

SEQ ID NO: 10684 - DNA, 23 bp, Artificial Sequence
  human ApoB siRNA sequence
aaaggagcagttgaccacaagct

SEQ ID NO: 10685 - DNA, 23 bp, Artificial Sequence
  human ApoB siRNA sequence
aaggagcagttgaccacaagctt

SEQ ID NO: 10686 - DNA, 23 bp, Artificial Sequence
  human ApoB siRNA sequence
aggagcagttgaccacaagctta

SEQ ID NO: 10687 - DNA, 23 bp, Artificial Sequence
  human ApoB siRNA sequence
ggagcagttgaccacaagcttag

SEQ ID NO: 10688 - DNA, 23 bp, Artificial Sequence
  human ApoB siRNA sequence
gagcagttgaccacaagcttagc

SEQ ID NO: 10689 - DNA, 23 bp, Artificial Sequence
  human ApoB siRNA sequence
agcagttgaccacaagcttagct

SEQ ID NO: 10690 - DNA, 23 bp, Artificial Sequence
  human ApoB siRNA sequence
gcagttgaccacaagcttagctt

SEQ ID NO: 10691 - DNA, 23 bp, Artificial Sequence
  human ApoB siRNA sequence
cagttgaccacaagcttagcttg

SEQ ID NO: 10692 - DNA, 23 bp, Artificial Sequence
  human ApoB siRNA sequence
agttgaccacaagcttagcttgg

SEQ ID NO: 10693 - DNA, 23 bp, Artificial Sequence
  human ApoB siRNA sequence
gttgaccacaagcttagcttgga

SEQ ID NO: 10694 - DNA, 23 bp, Artificial Sequence
  human ApoB siRNA sequence
ttgaccacaagcttagcttggaa

SEQ ID NO: 10695 - DNA, 23 bp, Artificial Sequence
  human ApoB siRNA sequence
tgaccacaagcttagcttggaaa

SEQ ID NO: 10696 - DNA, 23 bp, Artificial Sequence
  human ApoB siRNA sequence
gaccacaagcttagcttggaaag

SEQ ID NO: 10697 - DNA, 23 bp, Artificial Sequence
  human ApoB siRNA sequence
accacaagcttagcttggaaagc

SEQ ID NO: 10698 - DNA, 23 bp, Artificial Sequence
  human ApoB siRNA sequence
ccacaagcttagcttggaaagcc

SEQ ID NO: 10699 - DNA, 23 bp, Artificial Sequence
  human ApoB siRNA sequence
cacaagcttagcttggaaagcct

SEQ ID NO: 10700 - DNA, 23 bp, Artificial Sequence
  human ApoB siRNA sequence
acaagcttagcttggaaagcctc

SEQ ID NO: 10701 - DNA, 23 bp, Artificial Sequence
  human ApoB siRNA sequence
caagcttagcttggaaagcctca

SEQ ID NO: 10702 - DNA, 23 bp, Artificial Sequence
  human ApoB siRNA sequence
aagcttagcttggaaagcctcac

SEQ ID NO: 10703 - DNA, 23 bp, Artificial Sequence
  human ApoB siRNA sequence
agcttagcttggaaagcctcacc

SEQ ID NO: 10704 - DNA, 23 bp, Artificial Sequence
  human ApoB siRNA sequence
gcttagcttggaaagcctcacct

SEQ ID NO: 10705 - DNA, 23 bp, Artificial Sequence
  human ApoB siRNA sequence
cttagcttggaaagcctcacctc

SEQ ID NO: 10706 - DNA, 23 bp, Artificial Sequence
  human ApoB siRNA sequence
ttagcttggaaagcctcacctct

SEQ ID NO: 10707 - DNA, 23 bp, Artificial Sequence
  human ApoB siRNA sequence
tagcttggaaagcctcacctctt

SEQ ID NO: 10708 - DNA, 23 bp, Artificial Sequence
  human ApoB siRNA sequence
agcttggaaagcctcacctctta

SEQ ID NO: 10709 - DNA, 23 bp, Artificial Sequence
  human ApoB siRNA sequence
gcttggaaagcctcacctcttac

SEQ ID NO: 10710 - DNA, 23 bp, Artificial Sequence
  human ApoB siRNA sequence
cttggaaagcctcacctcttact

SEQ ID NO: 10711 - DNA, 23 bp, Artificial Sequence
  human ApoB siRNA sequence
ttggaaagcctcacctcttactt

SEQ ID NO: 10712 - DNA, 23 bp, Artificial Sequence
  human ApoB siRNA sequence
tggaaagcctcacctcttacttt

SEQ ID NO: 10713 - DNA, 23 bp, Artificial Sequence
  human ApoB siRNA sequence
ggaaagcctcacctcttactttt

SEQ ID NO: 10714 - DNA, 23 bp, Artificial Sequence
  human ApoB siRNA sequence
gaaagcctcacctcttacttttc

SEQ ID NO: 10715 - DNA, 23 bp, Artificial Sequence
  human ApoB siRNA sequence
aaagcctcacctcttacttttcc

SEQ ID NO: 10716 - DNA, 23 bp, Artificial Sequence
  human ApoB siRNA sequence
aagcctcacctcttacttttcca

SEQ ID NO: 10717 - DNA, 23 bp, Artificial Sequence
  human ApoB siRNA sequence
agcctcacctcttacttttccat

SEQ ID NO: 10718 - DNA, 23 bp, Artificial Sequence
  human ApoB siRNA sequence
gcctcacctcttacttttccatt

SEQ ID NO: 10719 - DNA, 23 bp, Artificial Sequence
  human ApoB siRNA sequence
cctcacctcttacttttccattg

SEQ ID NO: 10720 - DNA, 23 bp, Artificial Sequence
  human ApoB siRNA sequence
ctcacctcttacttttccattga

SEQ ID NO: 10721 - DNA, 23 bp, Artificial Sequence
  human ApoB siRNA sequence
tcacctcttacttttccattgag

SEQ ID NO: 10722 - DNA, 23 bp, Artificial Sequence
  human ApoB siRNA sequence
cacctcttacttttccattgagt

SEQ ID NO: 10723 - DNA, 23 bp, Artificial Sequence
  human ApoB siRNA sequence
acctcttacttttccattgagtc

SEQ ID NO: 10724 - DNA, 23 bp, Artificial Sequence
  human ApoB siRNA sequence
cctcttacttttccattgagtca

SEQ ID NO: 10725 - DNA, 23 bp, Artificial Sequence
  human ApoB siRNA sequence
ctcttacttttccattgagtcat

SEQ ID NO: 10726 - DNA, 23 bp, Artificial Sequence
  human ApoB siRNA sequence
tcttacttttccattgagtcatc

SEQ ID NO: 10727 - DNA, 23 bp, Artificial Sequence
  human ApoB siRNA sequence
cttacttttccattgagtcatct

SEQ ID NO: 10728 - DNA, 23 bp, Artificial Sequence
  human ApoB siRNA sequence
ttacttttccattgagtcatcta

SEQ ID NO: 10729 - DNA, 23 bp, Artificial Sequence
  human ApoB siRNA sequence
tacttttccattgagtcatctac

SEQ ID NO: 10730 - DNA, 23 bp, Artificial Sequence
  human ApoB siRNA sequence
acttttccattgagtcatctacc

SEQ ID NO: 10731 - DNA, 23 bp, Artificial Sequence
  human ApoB siRNA sequence
cttttccattgagtcatctacca

SEQ ID NO: 10732 - DNA, 23 bp, Artificial Sequence
  human ApoB siRNA sequence
ttttccattgagtcatctaccaa

SEQ ID NO: 10733 - DNA, 23 bp, Artificial Sequence
  human ApoB siRNA sequence
tttccattgagtcatctaccaaa

SEQ ID NO: 10734 - DNA, 23 bp, Artificial Sequence
  human ApoB siRNA sequence
ttccattgagtcatctaccaaag

SEQ ID NO: 10735 - DNA, 23 bp, Artificial Sequence
  human ApoB siRNA sequence
tccattgagtcatctaccaaagg

SEQ ID NO: 10736 - DNA, 23 bp, Artificial Sequence
  human ApoB siRNA sequence
ccattgagtcatctaccaaagga

SEQ ID NO: 10737 - DNA, 23 bp, Artificial Sequence
  human ApoB siRNA sequence
cattgagtcatctaccaaaggag

SEQ ID NO: 10738 - DNA, 23 bp, Artificial Sequence
  human ApoB siRNA sequence
attgagtcatctaccaaaggaga

SEQ ID NO: 10739 - DNA, 23 bp, Artificial Sequence
  human ApoB siRNA sequence
ttgagtcatctaccaaaggagat

SEQ ID NO: 10740 - DNA, 23 bp, Artificial Sequence
  human ApoB siRNA sequence
tgagtcatctaccaaaggagatg

SEQ ID NO: 10741 - DNA, 23 bp, Artificial Sequence
  human ApoB siRNA sequence
gagtcatctaccaaaggagatgt

SEQ ID NO: 10742 - DNA, 23 bp, Artificial Sequence
  human ApoB siRNA sequence
agtcatctaccaaaggagatgtc

SEQ ID NO: 10743 - DNA, 23 bp, Artificial Sequence
  human ApoB siRNA sequence
gtcatctaccaaaggagatgtca

SEQ ID NO: 10744 - DNA, 23 bp, Artificial Sequence
  human ApoB siRNA sequence
tcatctaccaaaggagatgtcaa

SEQ ID NO: 10745 - DNA, 23 bp, Artificial Sequence
  human ApoB siRNA sequence
catctaccaaaggagatgtcaag

SEQ ID NO: 10746 - DNA, 23 bp, Artificial Sequence
  human ApoB siRNA sequence
atctaccaaaggagatgtcaagg

SEQ ID NO: 10747 - DNA, 23 bp, Artificial Sequence
  human ApoB siRNA sequence
tctaccaaaggagatgtcaaggg

SEQ ID NO: 10748 - DNA, 23 bp, Artificial Sequence
  human ApoB siRNA sequence
ctaccaaaggagatgtcaagggt

SEQ ID NO: 10749 - DNA, 23 bp, Artificial Sequence
  human ApoB siRNA sequence
taccaaaggagatgtcaagggtt

SEQ ID NO: 10750 - DNA, 23 bp, Artificial Sequence
  human ApoB siRNA sequence
accaaaggagatgtcaagggttc

SEQ ID NO: 10751 - DNA, 23 bp, Artificial Sequence
  human ApoB siRNA sequence
ccaaaggagatgtcaagggttcg

SEQ ID NO: 10752 - DNA, 23 bp, Artificial Sequence
  human ApoB siRNA sequence
caaaggagatgtcaagggttcgg

SEQ ID NO: 10753 - DNA, 23 bp, Artificial Sequence
  human ApoB siRNA sequence
aaaggagatgtcaagggttcggt

SEQ ID NO: 10754 - DNA, 23 bp, Artificial Sequence
  human ApoB siRNA sequence
aaggagatgtcaagggttcggtt

SEQ ID NO: 10755 - DNA, 23 bp, Artificial Sequence
  human ApoB siRNA sequence
aggagatgtcaagggttcggttc

SEQ ID NO: 10756 - DNA, 23 bp, Artificial Sequence
  human ApoB siRNA sequence
ggagatgtcaagggttcggttct

SEQ ID NO: 10757 - DNA, 23 bp, Artificial Sequence
  human ApoB siRNA sequence
gagatgtcaagggttcggttctt

SEQ ID NO: 10758 - DNA, 23 bp, Artificial Sequence
  human ApoB siRNA sequence
agatgtcaagggttcggttcttt

SEQ ID NO: 10759 - DNA, 23 bp, Artificial Sequence
  human ApoB siRNA sequence
gatgtcaagggttcggttctttc

SEQ ID NO: 10760 - DNA, 23 bp, Artificial Sequence
  human ApoB siRNA sequence
atgtcaagggttcggttctttct

SEQ ID NO: 10761 - DNA, 23 bp, Artificial Sequence
  human ApoB siRNA sequence
tgtcaagggttcggttctttctc

SEQ ID NO: 10762 - DNA, 23 bp, Artificial Sequence
  human ApoB siRNA sequence
gtcaagggttcggttctttctcg

SEQ ID NO: 10763 - DNA, 23 bp, Artificial Sequence
  human ApoB siRNA sequence
tcaagggttcggttctttctcgg

SEQ ID NO: 10764 - DNA, 23 bp, Artificial Sequence
  human ApoB siRNA sequence
caagggttcggttctttctcggg

SEQ ID NO: 10765 - DNA, 23 bp, Artificial Sequence
  human ApoB siRNA sequence
aagggttcggttctttctcggga

SEQ ID NO: 10766 - DNA, 23 bp, Artificial Sequence
  human ApoB siRNA sequence
agggttcggttctttctcgggaa

SEQ ID NO: 10767 - DNA, 23 bp, Artificial Sequence
  human ApoB siRNA sequence
gggttcggttctttctcgggaat

SEQ ID NO: 10768 - DNA, 23 bp, Artificial Sequence
  human ApoB siRNA sequence
ggttcggttctttctcgggaata

SEQ ID NO: 10769 - DNA, 23 bp, Artificial Sequence
  human ApoB siRNA sequence
gttcggttctttctcgggaatat

SEQ ID NO: 10770 - DNA, 23 bp, Artificial Sequence
  human ApoB siRNA sequence
ttcggttctttctcgggaatatt

SEQ ID NO: 10771 - DNA, 23 bp, Artificial Sequence
  human ApoB siRNA sequence
tcggttctttctcgggaatattc

SEQ ID NO: 10772 - DNA, 23 bp, Artificial Sequence
  human ApoB siRNA sequence
cggttctttctcgggaatattca

SEQ ID NO: 10773 - DNA, 23 bp, Artificial Sequence
  human ApoB siRNA sequence
ggttctttctcgggaatattcag

SEQ ID NO: 10774 - DNA, 23 bp, Artificial Sequence
  human ApoB siRNA sequence
gttctttctcgggaatattcagg

SEQ ID NO: 10775 - DNA, 23 bp, Artificial Sequence
  human ApoB siRNA sequence
ttctttctcgggaatattcagga

SEQ ID NO: 10776 - DNA, 23 bp, Artificial Sequence
  human ApoB siRNA sequence
tctttctcgggaatattcaggaa

SEQ ID NO: 10777 - DNA, 23 bp, Artificial Sequence
  human ApoB siRNA sequence
ctttctcgggaatattcaggaac

SEQ ID NO: 10778 - DNA, 23 bp, Artificial Sequence
  human ApoB siRNA sequence
tttctcgggaatattcaggaact

SEQ ID NO: 10779 - DNA, 23 bp, Artificial Sequence
  human ApoB siRNA sequence
ttctcgggaatattcaggaacta

SEQ ID NO: 10780 - DNA, 23 bp, Artificial Sequence
  human ApoB siRNA sequence
tctcgggaatattcaggaactat

SEQ ID NO: 10781 - DNA, 23 bp, Artificial Sequence
  human ApoB siRNA sequence
ctcgggaatattcaggaactatt

SEQ ID NO: 10782 - DNA, 23 bp, Artificial Sequence
  human ApoB siRNA sequence
tcgggaatattcaggaactattg

SEQ ID NO: 10783 - DNA, 23 bp, Artificial Sequence
  human ApoB siRNA sequence
cgggaatattcaggaactattgc

SEQ ID NO: 10784 - DNA, 23 bp, Artificial Sequence
  human ApoB siRNA sequence
gggaatattcaggaactattgct

SEQ ID NO: 10785 - DNA, 23 bp, Artificial Sequence
  human ApoB siRNA sequence
ggaatattcaggaactattgcta

SEQ ID NO: 10786 - DNA, 23 bp, Artificial Sequence
  human ApoB siRNA sequence
gaatattcaggaactattgctag

SEQ ID NO: 10787 - DNA, 23 bp, Artificial Sequence
  human ApoB siRNA sequence
aatattcaggaactattgctagt

SEQ ID NO: 10788 - DNA, 23 bp, Artificial Sequence
  human ApoB siRNA sequence
atattcaggaactattgctagtg

SEQ ID NO: 10789 - DNA, 23 bp, Artificial Sequence
  human ApoB siRNA sequence
tattcaggaactattgctagtga

SEQ ID NO: 10790 - DNA, 23 bp, Artificial Sequence
  human ApoB siRNA sequence
attcaggaactattgctagtgag

SEQ ID NO: 10791 - DNA, 23 bp, Artificial Sequence
  human ApoB siRNA sequence
ttcaggaactattgctagtgagg

SEQ ID NO: 10792 - DNA, 23 bp, Artificial Sequence
  human ApoB siRNA sequence
tcaggaactattgctagtgaggc

SEQ ID NO: 10793 - DNA, 23 bp, Artificial Sequence
  human ApoB siRNA sequence
caggaactattgctagtgaggcc

SEQ ID NO: 10794 - DNA, 23 bp, Artificial Sequence
  human ApoB siRNA sequence
aggaactattgctagtgaggcca

SEQ ID NO: 10795 - DNA, 23 bp, Artificial Sequence
  human ApoB siRNA sequence
ggaactattgctagtgaggccaa

SEQ ID NO: 10796 - DNA, 23 bp, Artificial Sequence
  human ApoB siRNA sequence
gaactattgctagtgaggccaac

SEQ ID NO: 10797 - DNA, 23 bp, Artificial Sequence
  human ApoB siRNA sequence
aactattgctagtgaggccaaca

SEQ ID NO: 10798 - DNA, 23 bp, Artificial Sequence
  human ApoB siRNA sequence
actattgctagtgaggccaacac

SEQ ID NO: 10799 - DNA, 23 bp, Artificial Sequence
  human ApoB siRNA sequence
ctattgctagtgaggccaacact

SEQ ID NO: 10800 - DNA, 23 bp, Artificial Sequence
  human ApoB siRNA sequence
tattgctagtgaggccaacactt

SEQ ID NO: 10801 - DNA, 23 bp, Artificial Sequence
  human ApoB siRNA sequence
attgctagtgaggccaacactta

SEQ ID NO: 10802 - DNA, 23 bp, Artificial Sequence
  human ApoB siRNA sequence
ttgctagtgaggccaacacttac

SEQ ID NO: 10803 - DNA, 23 bp, Artificial Sequence
  human ApoB siRNA sequence
tgctagtgaggccaacacttact

SEQ ID NO: 10804 - DNA, 23 bp, Artificial Sequence
  human ApoB siRNA sequence
gctagtgaggccaacacttactt

SEQ ID NO: 10805 - DNA, 23 bp, Artificial Sequence
  human ApoB siRNA sequence
ctagtgaggccaacacttacttg

SEQ ID NO: 10806 - DNA, 23 bp, Artificial Sequence
  human ApoB siRNA sequence
tagtgaggccaacacttacttga

SEQ ID NO: 10807 - DNA, 23 bp, Artificial Sequence
  human ApoB siRNA sequence
agtgaggccaacacttacttgaa

SEQ ID NO: 10808 - DNA, 23 bp, Artificial Sequence
  human ApoB siRNA sequence
gtgaggccaacacttacttgaat

SEQ ID NO: 10809 - DNA, 23 bp, Artificial Sequence
  human ApoB siRNA sequence
tgaggccaacacttacttgaatt

SEQ ID NO: 10810 - DNA, 23 bp, Artificial Sequence
  human ApoB siRNA sequence
gaggccaacacttacttgaattc

SEQ ID NO: 10811 - DNA, 23 bp, Artificial Sequence
  human ApoB siRNA sequence
aggccaacacttacttgaattcc

SEQ ID NO: 10812 - DNA, 23 bp, Artificial Sequence
  human ApoB siRNA sequence
ggccaacacttacttgaattcca

SEQ ID NO: 10813 - DNA, 23 bp, Artificial Sequence
  human ApoB siRNA sequence
gccaacacttacttgaattccaa

SEQ ID NO: 10814 - DNA, 23 bp, Artificial Sequence
  human ApoB siRNA sequence
ccaacacttacttgaattccaag

SEQ ID NO: 10815 - DNA, 23 bp, Artificial Sequence
  human ApoB siRNA sequence
caacacttacttgaattccaaga

SEQ ID NO: 10816 - DNA, 23 bp, Artificial Sequence
  human ApoB siRNA sequence
aacacttacttgaattccaagag

SEQ ID NO: 10817 - DNA, 23 bp, Artificial Sequence
  human ApoB siRNA sequence
acacttacttgaattccaagagc

SEQ ID NO: 10818 - DNA, 23 bp, Artificial Sequence
  human ApoB siRNA sequence
cacttacttgaattccaagagca

SEQ ID NO: 10819 - DNA, 23 bp, Artificial Sequence
  human ApoB siRNA sequence
acttacttgaattccaagagcac

SEQ ID NO: 10820 - DNA, 23 bp, Artificial Sequence
  human ApoB siRNA sequence
cttacttgaattccaagagcaca

SEQ ID NO: 10821 - DNA, 23 bp, Artificial Sequence
  human ApoB siRNA sequence
ttacttgaattccaagagcacac

SEQ ID NO: 10822 - DNA, 23 bp, Artificial Sequence
  human ApoB siRNA sequence
tacttgaattccaagagcacacg

SEQ ID NO: 10823 - DNA, 23 bp, Artificial Sequence
  human ApoB siRNA sequence
acttgaattccaagagcacacgg

SEQ ID NO: 10824 - DNA, 23 bp, Artificial Sequence
  human ApoB siRNA sequence
cttgaattccaagagcacacggt

SEQ ID NO: 10825 - DNA, 23 bp, Artificial Sequence
  human ApoB siRNA sequence
ttgaattccaagagcacacggtc

SEQ ID NO: 10826 - DNA, 23 bp, Artificial Sequence
  human ApoB siRNA sequence
tgaattccaagagcacacggtct

SEQ ID NO: 10827 - DNA, 23 bp, Artificial Sequence
  human ApoB siRNA sequence
gaattccaagagcacacggtctt

SEQ ID NO: 10828 - DNA, 23 bp, Artificial Sequence
  human ApoB siRNA sequence
aattccaagagcacacggtcttc

SEQ ID NO: 10829 - DNA, 23 bp, Artificial Sequence
  human ApoB siRNA sequence
attccaagagcacacggtcttca

SEQ ID NO: 10830 - DNA, 23 bp, Artificial Sequence
  human ApoB siRNA sequence
ttccaagagcacacggtcttcag

SEQ ID NO: 10831 - DNA, 23 bp, Artificial Sequence
  human ApoB siRNA sequence
tccaagagcacacggtcttcagt

SEQ ID NO: 10832 - DNA, 23 bp, Artificial Sequence
  human ApoB siRNA sequence
ccaagagcacacggtcttcagtg

SEQ ID NO: 10833 - DNA, 23 bp, Artificial Sequence
  human ApoB siRNA sequence
caagagcacacggtcttcagtga

SEQ ID NO: 10834 - DNA, 23 bp, Artificial Sequence
  human ApoB siRNA sequence
aagagcacacggtcttcagtgaa

SEQ ID NO: 10835 - DNA, 23 bp, Artificial Sequence
  human ApoB siRNA sequence
agagcacacggtcttcagtgaag

SEQ ID NO: 10836 - DNA, 23 bp, Artificial Sequence
  human ApoB siRNA sequence
gagcacacggtcttcagtgaagc

SEQ ID NO: 10837 - DNA, 23 bp, Artificial Sequence
  human ApoB siRNA sequence
agcacacggtcttcagtgaagct

SEQ ID NO: 10838 - DNA, 23 bp, Artificial Sequence
  human ApoB siRNA sequence
gcacacggtcttcagtgaagctg

SEQ ID NO: 10839 - DNA, 23 bp, Artificial Sequence
  human ApoB siRNA sequence
cacacggtcttcagtgaagctgc

SEQ ID NO: 10840 - DNA, 23 bp, Artificial Sequence
  human ApoB siRNA sequence
acacggtcttcagtgaagctgca

SEQ ID NO: 10841 - DNA, 23 bp, Artificial Sequence
  human ApoB siRNA sequence
cacggtcttcagtgaagctgcag

SEQ ID NO: 10842 - DNA, 23 bp, Artificial Sequence
  human ApoB siRNA sequence
acggtcttcagtgaagctgcagg

SEQ ID NO: 10843 - DNA, 23 bp, Artificial Sequence
  human ApoB siRNA sequence
cggtcttcagtgaagctgcaggg

SEQ ID NO: 10844 - DNA, 23 bp, Artificial Sequence
  human ApoB siRNA sequence
ggtcttcagtgaagctgcagggc

SEQ ID NO: 10845 - DNA, 23 bp, Artificial Sequence
  human ApoB siRNA sequence
gtcttcagtgaagctgcagggca

SEQ ID NO: 10846 - DNA, 23 bp, Artificial Sequence
  human ApoB siRNA sequence
tcttcagtgaagctgcagggcac

SEQ ID NO: 10847 - DNA, 23 bp, Artificial Sequence
  human ApoB siRNA sequence
cttcagtgaagctgcagggcact

SEQ ID NO: 10848 - DNA, 23 bp, Artificial Sequence
  human ApoB siRNA sequence
ttcagtgaagctgcagggcactt

SEQ ID NO: 10849 - DNA, 23 bp, Artificial Sequence
  human ApoB siRNA sequence
tcagtgaagctgcagggcacttc

SEQ ID NO: 10850 - DNA, 23 bp, Artificial Sequence
  human ApoB siRNA sequence
cagtgaagctgcagggcacttcc

SEQ ID NO: 10851 - DNA, 23 bp, Artificial Sequence
  human ApoB siRNA sequence
agtgaagctgcagggcacttcca

SEQ ID NO: 10852 - DNA, 23 bp, Artificial Sequence
  human ApoB siRNA sequence
gtgaagctgcagggcacttccaa

SEQ ID NO: 10853 - DNA, 23 bp, Artificial Sequence
  human ApoB siRNA sequence
tgaagctgcagggcacttccaaa

SEQ ID NO: 10854 - DNA, 23 bp, Artificial Sequence
  human ApoB siRNA sequence
gaagctgcagggcacttccaaaa

SEQ ID NO: 10855 - DNA, 23 bp, Artificial Sequence
  human ApoB siRNA sequence
aagctgcagggcacttccaaaat

SEQ ID NO: 10856 - DNA, 23 bp, Artificial Sequence
  human ApoB siRNA sequence
agctgcagggcacttccaaaatt

SEQ ID NO: 10857 - DNA, 23 bp, Artificial Sequence
  human ApoB siRNA sequence
gctgcagggcacttccaaaattg

SEQ ID NO: 10858 - DNA, 23 bp, Artificial Sequence
  human ApoB siRNA sequence
ctgcagggcacttccaaaattga

SEQ ID NO: 10859 - DNA, 23 bp, Artificial Sequence
  human ApoB siRNA sequence
tgcagggcacttccaaaattgat

SEQ ID NO: 10860 - DNA, 23 bp, Artificial Sequence
  human ApoB siRNA sequence
gcagggcacttccaaaattgatg

SEQ ID NO: 10861 - DNA, 23 bp, Artificial Sequence
  human ApoB siRNA sequence
cagggcacttccaaaattgatga

SEQ ID NO: 10862 - DNA, 23 bp, Artificial Sequence
  human ApoB siRNA sequence
agggcacttccaaaattgatgat

SEQ ID NO: 10863 - DNA, 23 bp, Artificial Sequence
  human ApoB siRNA sequence
gggcacttccaaaattgatgata

SEQ ID NO: 10864 - DNA, 23 bp, Artificial Sequence
  human ApoB siRNA sequence
ggcacttccaaaattgatgatat

SEQ ID NO: 10865 - DNA, 23 bp, Artificial Sequence
  human ApoB siRNA sequence
gcacttccaaaattgatgatatc

SEQ ID NO: 10866 - DNA, 23 bp, Artificial Sequence
  human ApoB siRNA sequence
cacttccaaaattgatgatatct

SEQ ID NO: 10867 - DNA, 23 bp, Artificial Sequence
  human ApoB siRNA sequence
acttccaaaattgatgatatctg

SEQ ID NO: 10868 - DNA, 23 bp, Artificial Sequence
  human ApoB siRNA sequence
cttccaaaattgatgatatctgg

SEQ ID NO: 10869 - DNA, 23 bp, Artificial Sequence
  human ApoB siRNA sequence
ttccaaaattgatgatatctgga

SEQ ID NO: 10870 - DNA, 23 bp, Artificial Sequence
  human ApoB siRNA sequence
tccaaaattgatgatatctggaa

SEQ ID NO: 10871 - DNA, 23 bp, Artificial Sequence
  human ApoB siRNA sequence
ccaaaattgatgatatctggaac

SEQ ID NO: 10872 - DNA, 23 bp, Artificial Sequence
  human ApoB siRNA sequence
caaaattgatgatatctggaacc

SEQ ID NO: 10873 - DNA, 23 bp, Artificial Sequence
  human ApoB siRNA sequence
aaaattgatgatatctggaacct

SEQ ID NO: 10874 - DNA, 23 bp, Artificial Sequence
  human ApoB siRNA sequence
aaattgatgatatctggaacctt

SEQ ID NO: 10875 - DNA, 23 bp, Artificial Sequence
  human ApoB siRNA sequence
aattgatgatatctggaaccttg

SEQ ID NO: 10876 - DNA, 23 bp, Artificial Sequence
  human ApoB siRNA sequence
attgatgatatctggaaccttga

SEQ ID NO: 10877 - DNA, 23 bp, Artificial Sequence
  human ApoB siRNA sequence
ttgatgatatctggaaccttgaa

SEQ ID NO: 10878 - DNA, 23 bp, Artificial Sequence
  human ApoB siRNA sequence
tgatgatatctggaaccttgaag

SEQ ID NO: 10879 - DNA, 23 bp, Artificial Sequence
  human ApoB siRNA sequence
gatgatatctggaaccttgaagt

SEQ ID NO: 10880 - DNA, 23 bp, Artificial Sequence
  human ApoB siRNA sequence
atgatatctggaaccttgaagta

SEQ ID NO: 10881 - DNA, 23 bp, Artificial Sequence
  human ApoB siRNA sequence
tgatatctggaaccttgaagtaa

SEQ ID NO: 10882 - DNA, 23 bp, Artificial Sequence
  human ApoB siRNA sequence
gatatctggaaccttgaagtaaa

SEQ ID NO: 10883 - DNA, 23 bp, Artificial Sequence
  human ApoB siRNA sequence
atatctggaaccttgaagtaaaa

SEQ ID NO: 10884 - DNA, 23 bp, Artificial Sequence
  human ApoB siRNA sequence
tatctggaaccttgaagtaaaag

SEQ ID NO: 10885 - DNA, 23 bp, Artificial Sequence
  human ApoB siRNA sequence
atctggaaccttgaagtaaaaga

SEQ ID NO: 10886 - DNA, 23 bp, Artificial Sequence
  human ApoB siRNA sequence
tctggaaccttgaagtaaaagaa

SEQ ID NO: 10887 - DNA, 23 bp, Artificial Sequence
  human ApoB siRNA sequence
ctggaaccttgaagtaaaagaaa

SEQ ID NO: 10888 - DNA, 23 bp, Artificial Sequence
  human ApoB siRNA sequence
tggaaccttgaagtaaaagaaaa

SEQ ID NO: 10889 - DNA, 23 bp, Artificial Sequence
  human ApoB siRNA sequence
ggaaccttgaagtaaaagaaaat

SEQ ID NO: 10890 - DNA, 23 bp, Artificial Sequence
  human ApoB siRNA sequence
gaaccttgaagtaaaagaaaatt

SEQ ID NO: 10891 - DNA, 23 bp, Artificial Sequence
  human ApoB siRNA sequence
aaccttgaagtaaaagaaaattt

SEQ ID NO: 10892 - DNA, 23 bp, Artificial Sequence
  human ApoB siRNA sequence
accttgaagtaaaagaaaatttt

SEQ ID NO: 10893 - DNA, 23 bp, Artificial Sequence
  human ApoB siRNA sequence
ccttgaagtaaaagaaaattttg

SEQ ID NO: 10894 - DNA, 23 bp, Artificial Sequence
  human ApoB siRNA sequence
cttgaagtaaaagaaaattttgc

SEQ ID NO: 10895 - DNA, 23 bp, Artificial Sequence
  human ApoB siRNA sequence
ttgaagtaaaagaaaattttgct

SEQ ID NO: 10896 - DNA, 23 bp, Artificial Sequence
  human ApoB siRNA sequence
tgaagtaaaagaaaattttgctg

SEQ ID NO: 10897 - DNA, 23 bp, Artificial Sequence
  human ApoB siRNA sequence
gaagtaaaagaaaattttgctgg

SEQ ID NO: 10898 - DNA, 23 bp, Artificial Sequence
  human ApoB siRNA sequence
aagtaaaagaaaattttgctgga

SEQ ID NO: 10899 - DNA, 23 bp, Artificial Sequence
  human ApoB siRNA sequence
agtaaaagaaaattttgctggag

SEQ ID NO: 10900 - DNA, 23 bp, Artificial Sequence
  human ApoB siRNA sequence
gtaaaagaaaattttgctggaga

SEQ ID NO: 10901 - DNA, 23 bp, Artificial Sequence
  human ApoB siRNA sequence
taaaagaaaattttgctggagaa

SEQ ID NO: 10902 - DNA, 23 bp, Artificial Sequence
  human ApoB siRNA sequence
aaaagaaaattttgctggagaag

SEQ ID NO: 10903 - DNA, 23 bp, Artificial Sequence
  human ApoB siRNA sequence
aaagaaaattttgctggagaagc

SEQ ID NO: 10904 - DNA, 23 bp, Artificial Sequence
  human ApoB siRNA sequence
aagaaaattttgctggagaagcc

SEQ ID NO: 10905 - DNA, 23 bp, Artificial Sequence
  human ApoB siRNA sequence
agaaaattttgctggagaagcca

SEQ ID NO: 10906 - DNA, 23 bp, Artificial Sequence
  human ApoB siRNA sequence
gaaaattttgctggagaagccac

SEQ ID NO: 10907 - DNA, 23 bp, Artificial Sequence
  human ApoB siRNA sequence
aaaattttgctggagaagccaca

SEQ ID NO: 10908 - DNA, 23 bp, Artificial Sequence
  human ApoB siRNA sequence
aaattttgctggagaagccacac

SEQ ID NO: 10909 - DNA, 23 bp, Artificial Sequence
  human ApoB siRNA sequence
aattttgctggagaagccacact

SEQ ID NO: 10910 - DNA, 23 bp, Artificial Sequence
  human ApoB siRNA sequence
attttgctggagaagccacactc

SEQ ID NO: 10911 - DNA, 23 bp, Artificial Sequence
  human ApoB siRNA sequence
ttttgctggagaagccacactcc

SEQ ID NO: 10912 - DNA, 23 bp, Artificial Sequence
  human ApoB siRNA sequence
tttgctggagaagccacactcca

SEQ ID NO: 10913 - DNA, 23 bp, Artificial Sequence
  human ApoB siRNA sequence
ttgctggagaagccacactccaa

SEQ ID NO: 10914 - DNA, 23 bp, Artificial Sequence
  human ApoB siRNA sequence
tgctggagaagccacactccaac

SEQ ID NO: 10915 - DNA, 23 bp, Artificial Sequence
  human ApoB siRNA sequence
gctggagaagccacactccaacg

SEQ ID NO: 10916 - DNA, 23 bp, Artificial Sequence
  human ApoB siRNA sequence
ctggagaagccacactccaacgc

SEQ ID NO: 10917 - DNA, 23 bp, Artificial Sequence
  human ApoB siRNA sequence
tggagaagccacactccaacgca

SEQ ID NO: 10918 - DNA, 23 bp, Artificial Sequence
  human ApoB siRNA sequence
ggagaagccacactccaacgcat

SEQ ID NO: 10919 - DNA, 23 bp, Artificial Sequence
  human ApoB siRNA sequence
gagaagccacactccaacgcata

SEQ ID NO: 10920 - DNA, 23 bp, Artificial Sequence
  human ApoB siRNA sequence
agaagccacactccaacgcatat

SEQ ID NO: 10921 - DNA, 23 bp, Artificial Sequence
  human ApoB siRNA sequence
gaagccacactccaacgcatata

SEQ ID NO: 10922 - DNA, 23 bp, Artificial Sequence
  human ApoB siRNA sequence
aagccacactccaacgcatatat

SEQ ID NO: 10923 - DNA, 23 bp, Artificial Sequence
  human ApoB siRNA sequence
agccacactccaacgcatatatt

SEQ ID NO: 10924 - DNA, 23 bp, Artificial Sequence
  human ApoB siRNA sequence
gccacactccaacgcatatattc

SEQ ID NO: 10925 - DNA, 23 bp, Artificial Sequence
  human ApoB siRNA sequence
ccacactccaacgcatatattcc

SEQ ID NO: 10926 - DNA, 23 bp, Artificial Sequence
  human ApoB siRNA sequence
cacactccaacgcatatattccc

SEQ ID NO: 10927 - DNA, 23 bp, Artificial Sequence
  human ApoB siRNA sequence
acactccaacgcatatattccct

SEQ ID NO: 10928 - DNA, 23 bp, Artificial Sequence
  human ApoB siRNA sequence
cactccaacgcatatattccctc

SEQ ID NO: 10929 - DNA, 23 bp, Artificial Sequence
  human ApoB siRNA sequence
actccaacgcatatattccctct

SEQ ID NO: 10930 - DNA, 23 bp, Artificial Sequence
  human ApoB siRNA sequence
ctccaacgcatatattccctctg

SEQ ID NO: 10931 - DNA, 23 bp, Artificial Sequence
  human ApoB siRNA sequence
tccaacgcatatattccctctgg

SEQ ID NO: 10932 - DNA, 23 bp, Artificial Sequence
  human ApoB siRNA sequence
ccaacgcatatattccctctggg

SEQ ID NO: 10933 - DNA, 23 bp, Artificial Sequence
  human ApoB siRNA sequence
caacgcatatattccctctggga

SEQ ID NO: 10934 - DNA, 23 bp, Artificial Sequence
  human ApoB siRNA sequence
aacgcatatattccctctgggag

SEQ ID NO: 10935 - DNA, 23 bp, Artificial Sequence
  human ApoB siRNA sequence
acgcatatattccctctgggagc

SEQ ID NO: 10936 - DNA, 23 bp, Artificial Sequence
  human ApoB siRNA sequence
cgcatatattccctctgggagca

SEQ ID NO: 10937 - DNA, 23 bp, Artificial Sequence
  human ApoB siRNA sequence
gcatatattccctctgggagcac

SEQ ID NO: 10938 - DNA, 23 bp, Artificial Sequence
  human ApoB siRNA sequence
catatattccctctgggagcaca

SEQ ID NO: 10939 - DNA, 23 bp, Artificial Sequence
  human ApoB siRNA sequence
atatattccctctgggagcacag

SEQ ID NO: 10940 - DNA, 23 bp, Artificial Sequence
  human ApoB siRNA sequence
tatattccctctgggagcacagt

SEQ ID NO: 10941 - DNA, 23 bp, Artificial Sequence
  human ApoB siRNA sequence
atattccctctgggagcacagta

SEQ ID NO: 10942 - DNA, 23 bp, Artificial Sequence
  human ApoB siRNA sequence
tattccctctgggagcacagtac

SEQ ID NO: 10943 - DNA, 23 bp, Artificial Sequence
  human ApoB siRNA sequence
attccctctgggagcacagtacg

SEQ ID NO: 10944 - DNA, 23 bp, Artificial Sequence
  human ApoB siRNA sequence
ttccctctgggagcacagtacga

SEQ ID NO: 10945 - DNA, 23 bp, Artificial Sequence
  human ApoB siRNA sequence
tccctctgggagcacagtacgaa

SEQ ID NO: 10946 - DNA, 23 bp, Artificial Sequence
  human ApoB siRNA sequence
ccctctgggagcacagtacgaaa

SEQ ID NO: 10947 - DNA, 23 bp, Artificial Sequence
  human ApoB siRNA sequence
cctctgggagcacagtacgaaaa

SEQ ID NO: 10948 - DNA, 23 bp, Artificial Sequence
  human ApoB siRNA sequence
ctctgggagcacagtacgaaaaa

SEQ ID NO: 10949 - DNA, 23 bp, Artificial Sequence
  human ApoB siRNA sequence
tctgggagcacagtacgaaaaac

SEQ ID NO: 10950 - DNA, 23 bp, Artificial Sequence
  human ApoB siRNA sequence
ctgggagcacagtacgaaaaacc

SEQ ID NO: 10951 - DNA, 23 bp, Artificial Sequence
  human ApoB siRNA sequence
tgggagcacagtacgaaaaacca

SEQ ID NO: 10952 - DNA, 23 bp, Artificial Sequence
  human ApoB siRNA sequence
gggagcacagtacgaaaaaccac

SEQ ID NO: 10953 - DNA, 23 bp, Artificial Sequence
  human ApoB siRNA sequence
ggagcacagtacgaaaaaccact

SEQ ID NO: 10954 - DNA, 23 bp, Artificial Sequence
  human ApoB siRNA sequence
gagcacagtacgaaaaaccactt

SEQ ID NO: 10955 - DNA, 23 bp, Artificial Sequence
  human ApoB siRNA sequence
agcacagtacgaaaaaccactta

SEQ ID NO: 10956 - DNA, 23 bp, Artificial Sequence
  human ApoB siRNA sequence
gcacagtacgaaaaaccacttac

SEQ ID NO: 10957 - DNA, 23 bp, Artificial Sequence
  human ApoB siRNA sequence
cacagtacgaaaaaccacttaca

SEQ ID NO: 10958 - DNA, 23 bp, Artificial Sequence
  human ApoB siRNA sequence
acagtacgaaaaaccacttacag

SEQ ID NO: 10959 - DNA, 23 bp, Artificial Sequence
  human ApoB siRNA sequence
cagtacgaaaaaccacttacagc

SEQ ID NO: 10960 - DNA, 23 bp, Artificial Sequence
  human ApoB siRNA sequence
agtacgaaaaaccacttacagct

SEQ ID NO: 10961 - DNA, 23 bp, Artificial Sequence
  human ApoB siRNA sequence
gtacgaaaaaccacttacagcta

SEQ ID NO: 10962 - DNA, 23 bp, Artificial Sequence
  human ApoB siRNA sequence
tacgaaaaaccacttacagctag

SEQ ID NO: 10963 - DNA, 23 bp, Artificial Sequence
  human ApoB siRNA sequence
acgaaaaaccacttacagctaga

SEQ ID NO: 10964 - DNA, 23 bp, Artificial Sequence
  human ApoB siRNA sequence
cgaaaaaccacttacagctagag

SEQ ID NO: 10965 - DNA, 23 bp, Artificial Sequence
  human ApoB siRNA sequence
gaaaaaccacttacagctagagg

SEQ ID NO: 10966 - DNA, 23 bp, Artificial Sequence
  human ApoB siRNA sequence
aaaaaccacttacagctagaggg

SEQ ID NO: 10967 - DNA, 23 bp, Artificial Sequence
  human ApoB siRNA sequence
aaaaccacttacagctagagggc

SEQ ID NO: 10968 - DNA, 23 bp, Artificial Sequence
  human ApoB siRNA sequence
aaaccacttacagctagagggcc

SEQ ID NO: 10969 - DNA, 23 bp, Artificial Sequence
  human ApoB siRNA sequence
aaccacttacagctagagggcct

SEQ ID NO: 10970 - DNA, 23 bp, Artificial Sequence
  human ApoB siRNA sequence
accacttacagctagagggcctc

SEQ ID NO: 10971 - DNA, 23 bp, Artificial Sequence
  human ApoB siRNA sequence
ccacttacagctagagggcctct

SEQ ID NO: 10972 - DNA, 23 bp, Artificial Sequence
  human ApoB siRNA sequence
cacttacagctagagggcctctt

SEQ ID NO: 10973 - DNA, 23 bp, Artificial Sequence
  human ApoB siRNA sequence
acttacagctagagggcctcttt

SEQ ID NO: 10974 - DNA, 23 bp, Artificial Sequence
  human ApoB siRNA sequence
cttacagctagagggcctctttt

SEQ ID NO: 10975 - DNA, 23 bp, Artificial Sequence
  human ApoB siRNA sequence
ttacagctagagggcctcttttt

SEQ ID NO: 10976 - DNA, 23 bp, Artificial Sequence
  human ApoB siRNA sequence
tacagctagagggcctctttttc

SEQ ID NO: 10977 - DNA, 23 bp, Artificial Sequence
  human ApoB siRNA sequence
acagctagagggcctctttttca

SEQ ID NO: 10978 - DNA, 23 bp, Artificial Sequence
  human ApoB siRNA sequence
cagctagagggcctctttttcac

SEQ ID NO: 10979 - DNA, 23 bp, Artificial Sequence
  human ApoB siRNA sequence
agctagagggcctctttttcacc

SEQ ID NO: 10980 - DNA, 23 bp, Artificial Sequence
  human ApoB siRNA sequence
gctagagggcctctttttcacca

SEQ ID NO: 10981 - DNA, 23 bp, Artificial Sequence
  human ApoB siRNA sequence
ctagagggcctctttttcaccaa

SEQ ID NO: 10982 - DNA, 23 bp, Artificial Sequence
  human ApoB siRNA sequence
tagagggcctctttttcaccaac

SEQ ID NO: 10983 - DNA, 23 bp, Artificial Sequence
  human ApoB siRNA sequence
agagggcctctttttcaccaacg

SEQ ID NO: 10984 - DNA, 23 bp, Artificial Sequence
  human ApoB siRNA sequence
gagggcctctttttcaccaacgg

SEQ ID NO: 10985 - DNA, 23 bp, Artificial Sequence
  human ApoB siRNA sequence
agggcctctttttcaccaacgga

SEQ ID NO: 10986 - DNA, 23 bp, Artificial Sequence
  human ApoB siRNA sequence
gggcctctttttcaccaacggag

SEQ ID NO: 10987 - DNA, 23 bp, Artificial Sequence
  human ApoB siRNA sequence
ggcctctttttcaccaacggaga

SEQ ID NO: 10988 - DNA, 23 bp, Artificial Sequence
  human ApoB siRNA sequence
gcctctttttcaccaacggagaa

SEQ ID NO: 10989 - DNA, 23 bp, Artificial Sequence
  human ApoB siRNA sequence
cctctttttcaccaacggagaac

SEQ ID NO: 10990 - DNA, 23 bp, Artificial Sequence
  human ApoB siRNA sequence
ctctttttcaccaacggagaaca

SEQ ID NO: 10991 - DNA, 23 bp, Artificial Sequence
  human ApoB siRNA sequence
tctttttcaccaacggagaacat

SEQ ID NO: 10992 - DNA, 23 bp, Artificial Sequence
  human ApoB siRNA sequence
ctttttcaccaacggagaacata

SEQ ID NO: 10993 - DNA, 23 bp, Artificial Sequence
  human ApoB siRNA sequence
tttttcaccaacggagaacatac

SEQ ID NO: 10994 - DNA, 23 bp, Artificial Sequence
  human ApoB siRNA sequence
ttttcaccaacggagaacataca

SEQ ID NO: 10995 - DNA, 23 bp, Artificial Sequence
  human ApoB siRNA sequence
tttcaccaacggagaacatacaa

SEQ ID NO: 10996 - DNA, 23 bp, Artificial Sequence
  human ApoB siRNA sequence
ttcaccaacggagaacatacaag

SEQ ID NO: 10997 - DNA, 23 bp, Artificial Sequence
  human ApoB siRNA sequence
tcaccaacggagaacatacaagc

SEQ ID NO: 10998 - DNA, 23 bp, Artificial Sequence
  human ApoB siRNA sequence
caccaacggagaacatacaagca

SEQ ID NO: 10999 - DNA, 23 bp, Artificial Sequence
  human ApoB siRNA sequence
accaacggagaacatacaagcaa

SEQ ID NO: 11000 - DNA, 23 bp, Artificial Sequence
  human ApoB siRNA sequence
ccaacggagaacatacaagcaaa

SEQ ID NO: 11001 - DNA, 23 bp, Artificial Sequence
  human ApoB siRNA sequence
caacggagaacatacaagcaaag

SEQ ID NO: 11002 - DNA, 23 bp, Artificial Sequence
  human ApoB siRNA sequence
aacggagaacatacaagcaaagc

SEQ ID NO: 11003 - DNA, 23 bp, Artificial Sequence
  human ApoB siRNA sequence
acggagaacatacaagcaaagcc

SEQ ID NO: 11004 - DNA, 23 bp, Artificial Sequence
  human ApoB siRNA sequence
cggagaacatacaagcaaagcca

SEQ ID NO: 11005 - DNA, 23 bp, Artificial Sequence
  human ApoB siRNA sequence
ggagaacatacaagcaaagccac

SEQ ID NO: 11006 - DNA, 23 bp, Artificial Sequence
  human ApoB siRNA sequence
gagaacatacaagcaaagccacc

SEQ ID NO: 11007 - DNA, 23 bp, Artificial Sequence
  human ApoB siRNA sequence
agaacatacaagcaaagccaccc

SEQ ID NO: 11008 - DNA, 23 bp, Artificial Sequence
  human ApoB siRNA sequence
gaacatacaagcaaagccaccct

SEQ ID NO: 11009 - DNA, 23 bp, Artificial Sequence
  human ApoB siRNA sequence
aacatacaagcaaagccaccctg

SEQ ID NO: 11010 - DNA, 23 bp, Artificial Sequence
  human ApoB siRNA sequence
acatacaagcaaagccaccctgg

SEQ ID NO: 11011 - DNA, 23 bp, Artificial Sequence
  human ApoB siRNA sequence
catacaagcaaagccaccctgga

SEQ ID NO: 11012 - DNA, 23 bp, Artificial Sequence
  human ApoB siRNA sequence
atacaagcaaagccaccctggaa

SEQ ID NO: 11013 - DNA, 23 bp, Artificial Sequence
  human ApoB siRNA sequence
tacaagcaaagccaccctggaac

SEQ ID NO: 11014 - DNA, 23 bp, Artificial Sequence
  human ApoB siRNA sequence
acaagcaaagccaccctggaact

SEQ ID NO: 11015 - DNA, 23 bp, Artificial Sequence
  human ApoB siRNA sequence
caagcaaagccaccctggaactc

SEQ ID NO: 11016 - DNA, 23 bp, Artificial Sequence
  human ApoB siRNA sequence
aagcaaagccaccctggaactct

SEQ ID NO: 11017 - DNA, 23 bp, Artificial Sequence
  human ApoB siRNA sequence
agcaaagccaccctggaactctc

SEQ ID NO: 11018 - DNA, 23 bp, Artificial Sequence
  human ApoB siRNA sequence
gcaaagccaccctggaactctct

SEQ ID NO: 11019 - DNA, 23 bp, Artificial Sequence
  human ApoB siRNA sequence
caaagccaccctggaactctctc

SEQ ID NO: 11020 - DNA, 23 bp, Artificial Sequence
  human ApoB siRNA sequence
aaagccaccctggaactctctcc

SEQ ID NO: 11021 - DNA, 23 bp, Artificial Sequence
  human ApoB siRNA sequence
aagccaccctggaactctctcca

SEQ ID NO: 11022 - DNA, 23 bp, Artificial Sequence
  human ApoB siRNA sequence
agccaccctggaactctctccat

SEQ ID NO: 11023 - DNA, 23 bp, Artificial Sequence
  human ApoB siRNA sequence
gccaccctggaactctctccatg

SEQ ID NO: 11024 - DNA, 23 bp, Artificial Sequence
  human ApoB siRNA sequence
ccaccctggaactctctccatgg

SEQ ID NO: 11025 - DNA, 23 bp, Artificial Sequence
  human ApoB siRNA sequence
caccctggaactctctccatggc

SEQ ID NO: 11026 - DNA, 23 bp, Artificial Sequence
  human ApoB siRNA sequence
accctggaactctctccatggca

SEQ ID NO: 11027 - DNA, 23 bp, Artificial Sequence
  human ApoB siRNA sequence
ccctggaactctctccatggcaa

SEQ ID NO: 11028 - DNA, 23 bp, Artificial Sequence
  human ApoB siRNA sequence
cctggaactctctccatggcaaa

SEQ ID NO: 11029 - DNA, 23 bp, Artificial Sequence
  human ApoB siRNA sequence
ctggaactctctccatggcaaat

SEQ ID NO: 11030 - DNA, 23 bp, Artificial Sequence
  human ApoB siRNA sequence
tggaactctctccatggcaaatg

SEQ ID NO: 11031 - DNA, 23 bp, Artificial Sequence
  human ApoB siRNA sequence
ggaactctctccatggcaaatgt

SEQ ID NO: 11032 - DNA, 23 bp, Artificial Sequence
  human ApoB siRNA sequence
gaactctctccatggcaaatgtc

SEQ ID NO: 11033 - DNA, 23 bp, Artificial Sequence
  human ApoB siRNA sequence
aactctctccatggcaaatgtca

SEQ ID NO: 11034 - DNA, 23 bp, Artificial Sequence
  human ApoB siRNA sequence
actctctccatggcaaatgtcag

SEQ ID NO: 11035 - DNA, 23 bp, Artificial Sequence
  human ApoB siRNA sequence
ctctctccatggcaaatgtcagc

SEQ ID NO: 11036 - DNA, 23 bp, Artificial Sequence
  human ApoB siRNA sequence
tctctccatggcaaatgtcagct

SEQ ID NO: 11037 - DNA, 23 bp, Artificial Sequence
  human ApoB siRNA sequence
ctctccatggcaaatgtcagctc

SEQ ID NO: 11038 - DNA, 23 bp, Artificial Sequence
  human ApoB siRNA sequence
tctccatggcaaatgtcagctct

SEQ ID NO: 11039 - DNA, 23 bp, Artificial Sequence
  human ApoB siRNA sequence
ctccatggcaaatgtcagctctt

SEQ ID NO: 11040 - DNA, 23 bp, Artificial Sequence
  human ApoB siRNA sequence
tccatggcaaatgtcagctcttg

SEQ ID NO: 11041 - DNA, 23 bp, Artificial Sequence
  human ApoB siRNA sequence
ccatggcaaatgtcagctcttgt

SEQ ID NO: 11042 - DNA, 23 bp, Artificial Sequence
  human ApoB siRNA sequence
catggcaaatgtcagctcttgtt

SEQ ID NO: 11043 - DNA, 23 bp, Artificial Sequence
  human ApoB siRNA sequence
atggcaaatgtcagctcttgttc

SEQ ID NO: 11044 - DNA, 23 bp, Artificial Sequence
  human ApoB siRNA sequence
tggcaaatgtcagctcttgttca

SEQ ID NO: 11045 - DNA, 23 bp, Artificial Sequence
  human ApoB siRNA sequence
ggcaaatgtcagctcttgttcag

SEQ ID NO: 11046 - DNA, 23 bp, Artificial Sequence
  human ApoB siRNA sequence
gcaaatgtcagctcttgttcagg

SEQ ID NO: 11047 - DNA, 23 bp, Artificial Sequence
  human ApoB siRNA sequence
caaatgtcagctcttgttcaggt

SEQ ID NO: 11048 - DNA, 23 bp, Artificial Sequence
  human ApoB siRNA sequence
aaatgtcagctcttgttcaggtc

SEQ ID NO: 11049 - DNA, 23 bp, Artificial Sequence
  human ApoB siRNA sequence
aatgtcagctcttgttcaggtcc

SEQ ID NO: 11050 - DNA, 23 bp, Artificial Sequence
  human ApoB siRNA sequence
atgtcagctcttgttcaggtcca

SEQ ID NO: 11051 - DNA, 23 bp, Artificial Sequence
  human ApoB siRNA sequence
tgtcagctcttgttcaggtccat

SEQ ID NO: 11052 - DNA, 23 bp, Artificial Sequence
  human ApoB siRNA sequence
gtcagctcttgttcaggtccatg

SEQ ID NO: 11053 - DNA, 23 bp, Artificial Sequence
  human ApoB siRNA sequence
tcagctcttgttcaggtccatgc

SEQ ID NO: 11054 - DNA, 23 bp, Artificial Sequence
  human ApoB siRNA sequence
cagctcttgttcaggtccatgca

SEQ ID NO: 11055 - DNA, 23 bp, Artificial Sequence
  human ApoB siRNA sequence
agctcttgttcaggtccatgcaa

SEQ ID NO: 11056 - DNA, 23 bp, Artificial Sequence
  human ApoB siRNA sequence
gctcttgttcaggtccatgcaag

SEQ ID NO: 11057 - DNA, 23 bp, Artificial Sequence
  human ApoB siRNA sequence
ctcttgttcaggtccatgcaagt

SEQ ID NO: 11058 - DNA, 23 bp, Artificial Sequence
  human ApoB siRNA sequence
tcttgttcaggtccatgcaagtc

SEQ ID NO: 11059 - DNA, 23 bp, Artificial Sequence
  human ApoB siRNA sequence
cttgttcaggtccatgcaagtca

SEQ ID NO: 11060 - DNA, 23 bp, Artificial Sequence
  human ApoB siRNA sequence
ttgttcaggtccatgcaagtcag

SEQ ID NO: 11061 - DNA, 23 bp, Artificial Sequence
  human ApoB siRNA sequence
tgttcaggtccatgcaagtcagc

SEQ ID NO: 11062 - DNA, 23 bp, Artificial Sequence
  human ApoB siRNA sequence
gttcaggtccatgcaagtcagcc

SEQ ID NO: 11063 - DNA, 23 bp, Artificial Sequence
  human ApoB siRNA sequence
ttcaggtccatgcaagtcagccc

SEQ ID NO: 11064 - DNA, 23 bp, Artificial Sequence
  human ApoB siRNA sequence
tcaggtccatgcaagtcagccca

SEQ ID NO: 11065 - DNA, 23 bp, Artificial Sequence
  human ApoB siRNA sequence
caggtccatgcaagtcagcccag

SEQ ID NO: 11066 - DNA, 23 bp, Artificial Sequence
  human ApoB siRNA sequence
aggtccatgcaagtcagcccagt

SEQ ID NO: 11067 - DNA, 23 bp, Artificial Sequence
  human ApoB siRNA sequence
ggtccatgcaagtcagcccagtt

SEQ ID NO: 11068 - DNA, 23 bp, Artificial Sequence
  human ApoB siRNA sequence
gtccatgcaagtcagcccagttc

SEQ ID NO: 11069 - DNA, 23 bp, Artificial Sequence
  human ApoB siRNA sequence
tccatgcaagtcagcccagttcc

SEQ ID NO: 11070 - DNA, 23 bp, Artificial Sequence
  human ApoB siRNA sequence
ccatgcaagtcagcccagttcct

SEQ ID NO: 11071 - DNA, 23 bp, Artificial Sequence
  human ApoB siRNA sequence
catgcaagtcagcccagttcctt

SEQ ID NO: 11072 - DNA, 23 bp, Artificial Sequence
  human ApoB siRNA sequence
atgcaagtcagcccagttccttc

SEQ ID NO: 11073 - DNA, 23 bp, Artificial Sequence
  human ApoB siRNA sequence
tgcaagtcagcccagttccttcc

SEQ ID NO: 11074 - DNA, 23 bp, Artificial Sequence
  human ApoB siRNA sequence
gcaagtcagcccagttccttcca

SEQ ID NO: 11075 - DNA, 23 bp, Artificial Sequence
  human ApoB siRNA sequence
caagtcagcccagttccttccat

SEQ ID NO: 11076 - DNA, 23 bp, Artificial Sequence
  human ApoB siRNA sequence
aagtcagcccagttccttccatg

SEQ ID NO: 11077 - DNA, 23 bp, Artificial Sequence
  human ApoB siRNA sequence
agtcagcccagttccttccatga

SEQ ID NO: 11078 - DNA, 23 bp, Artificial Sequence
  human ApoB siRNA sequence
gtcagcccagttccttccatgat

SEQ ID NO: 11079 - DNA, 23 bp, Artificial Sequence
  human ApoB siRNA sequence
tcagcccagttccttccatgatt

SEQ ID NO: 11080 - DNA, 23 bp, Artificial Sequence
  human ApoB siRNA sequence
cagcccagttccttccatgattt

SEQ ID NO: 11081 - DNA, 23 bp, Artificial Sequence
  human ApoB siRNA sequence
agcccagttccttccatgatttc

SEQ ID NO: 11082 - DNA, 23 bp, Artificial Sequence
  human ApoB siRNA sequence
gcccagttccttccatgatttcc

SEQ ID NO: 11083 - DNA, 23 bp, Artificial Sequence
  human ApoB siRNA sequence
cccagttccttccatgatttccc

SEQ ID NO: 11084 - DNA, 23 bp, Artificial Sequence
  human ApoB siRNA sequence
ccagttccttccatgatttccct

SEQ ID NO: 11085 - DNA, 23 bp, Artificial Sequence
  human ApoB siRNA sequence
cagttccttccatgatttccctg

SEQ ID NO: 11086 - DNA, 23 bp, Artificial Sequence
  human ApoB siRNA sequence
agttccttccatgatttccctga

SEQ ID NO: 11087 - DNA, 23 bp, Artificial Sequence
  human ApoB siRNA sequence
gttccttccatgatttccctgac

SEQ ID NO: 11088 - DNA, 23 bp, Artificial Sequence
  human ApoB siRNA sequence
ttccttccatgatttccctgacc

SEQ ID NO: 11089 - DNA, 23 bp, Artificial Sequence
  human ApoB siRNA sequence
tccttccatgatttccctgacct

SEQ ID NO: 11090 - DNA, 23 bp, Artificial Sequence
  human ApoB siRNA sequence
ccttccatgatttccctgacctt

SEQ ID NO: 11091 - DNA, 23 bp, Artificial Sequence
  human ApoB siRNA sequence
cttccatgatttccctgaccttg

SEQ ID NO: 11092 - DNA, 23 bp, Artificial Sequence
  human ApoB siRNA sequence
ttccatgatttccctgaccttgg

SEQ ID NO: 11093 - DNA, 23 bp, Artificial Sequence
  human ApoB siRNA sequence
tccatgatttccctgaccttggc

SEQ ID NO: 11094 - DNA, 23 bp, Artificial Sequence
  human ApoB siRNA sequence
ccatgatttccctgaccttggcc

SEQ ID NO: 11095 - DNA, 23 bp, Artificial Sequence
  human ApoB siRNA sequence
catgatttccctgaccttggcca

SEQ ID NO: 11096 - DNA, 23 bp, Artificial Sequence
  human ApoB siRNA sequence
atgatttccctgaccttggccag

SEQ ID NO: 11097 - DNA, 23 bp, Artificial Sequence
  human ApoB siRNA sequence
tgatttccctgaccttggccagg

SEQ ID NO: 11098 - DNA, 23 bp, Artificial Sequence
  human ApoB siRNA sequence
gatttccctgaccttggccagga

SEQ ID NO: 11099 - DNA, 23 bp, Artificial Sequence
  human ApoB siRNA sequence
atttccctgaccttggccaggaa

SEQ ID NO: 11100 - DNA, 23 bp, Artificial Sequence
  human ApoB siRNA sequence
tttccctgaccttggccaggaag

SEQ ID NO: 11101 - DNA, 23 bp, Artificial Sequence
  human ApoB siRNA sequence
ttccctgaccttggccaggaagt

SEQ ID NO: 11102 - DNA, 23 bp, Artificial Sequence
  human ApoB siRNA sequence
tccctgaccttggccaggaagtg

SEQ ID NO: 11103 - DNA, 23 bp, Artificial Sequence
  human ApoB siRNA sequence
ccctgaccttggccaggaagtgg

SEQ ID NO: 11104 - DNA, 23 bp, Artificial Sequence
  human ApoB siRNA sequence
cctgaccttggccaggaagtggc

SEQ ID NO: 11105 - DNA, 23 bp, Artificial Sequence
  human ApoB siRNA sequence
ctgaccttggccaggaagtggcc

SEQ ID NO: 11106 - DNA, 23 bp, Artificial Sequence
  human ApoB siRNA sequence
tgaccttggccaggaagtggccc

SEQ ID NO: 11107 - DNA, 23 bp, Artificial Sequence
  human ApoB siRNA sequence
gaccttggccaggaagtggccct

SEQ ID NO: 11108 - DNA, 23 bp, Artificial Sequence
  human ApoB siRNA sequence
accttggccaggaagtggccctg

SEQ ID NO: 11109 - DNA, 23 bp, Artificial Sequence
  human ApoB siRNA sequence
ccttggccaggaagtggccctga

SEQ ID NO: 11110 - DNA, 23 bp, Artificial Sequence
  human ApoB siRNA sequence
cttggccaggaagtggccctgaa

SEQ ID NO: 11111 - DNA, 23 bp, Artificial Sequence
  human ApoB siRNA sequence
ttggccaggaagtggccctgaat

SEQ ID NO: 11112 - DNA, 23 bp, Artificial Sequence
  human ApoB siRNA sequence
tggccaggaagtggccctgaatg

SEQ ID NO: 11113 - DNA, 23 bp, Artificial Sequence
  human ApoB siRNA sequence
ggccaggaagtggccctgaatgc

SEQ ID NO: 11114 - DNA, 23 bp, Artificial Sequence
  human ApoB siRNA sequence
gccaggaagtggccctgaatgct

SEQ ID NO: 11115 - DNA, 23 bp, Artificial Sequence
  human ApoB siRNA sequence
ccaggaagtggccctgaatgcta

SEQ ID NO: 11116 - DNA, 23 bp, Artificial Sequence
  human ApoB siRNA sequence
caggaagtggccctgaatgctaa

SEQ ID NO: 11117 - DNA, 23 bp, Artificial Sequence
  human ApoB siRNA sequence
aggaagtggccctgaatgctaac

SEQ ID NO: 11118 - DNA, 23 bp, Artificial Sequence
  human ApoB siRNA sequence
ggaagtggccctgaatgctaaca

SEQ ID NO: 11119 - DNA, 23 bp, Artificial Sequence
  human ApoB siRNA sequence
gaagtggccctgaatgctaacac

SEQ ID NO: 11120 - DNA, 23 bp, Artificial Sequence
  human ApoB siRNA sequence
aagtggccctgaatgctaacact

SEQ ID NO: 11121 - DNA, 23 bp, Artificial Sequence
  human ApoB siRNA sequence
agtggccctgaatgctaacacta

SEQ ID NO: 11122 - DNA, 23 bp, Artificial Sequence
  human ApoB siRNA sequence
gtggccctgaatgctaacactaa

SEQ ID NO: 11123 - DNA, 23 bp, Artificial Sequence
  human ApoB siRNA sequence
tggccctgaatgctaacactaag

SEQ ID NO: 11124 - DNA, 23 bp, Artificial Sequence
  human ApoB siRNA sequence
ggccctgaatgctaacactaaga

SEQ ID NO: 11125 - DNA, 23 bp, Artificial Sequence
  human ApoB siRNA sequence
gccctgaatgctaacactaagaa

SEQ ID NO: 11126 - DNA, 23 bp, Artificial Sequence
  human ApoB siRNA sequence
ccctgaatgctaacactaagaac

SEQ ID NO: 11127 - DNA, 23 bp, Artificial Sequence
  human ApoB siRNA sequence
cctgaatgctaacactaagaacc

SEQ ID NO: 11128 - DNA, 23 bp, Artificial Sequence
  human ApoB siRNA sequence
ctgaatgctaacactaagaacca

SEQ ID NO: 11129 - DNA, 23 bp, Artificial Sequence
  human ApoB siRNA sequence
tgaatgctaacactaagaaccag

SEQ ID NO: 11130 - DNA, 23 bp, Artificial Sequence
  human ApoB siRNA sequence
gaatgctaacactaagaaccaga

SEQ ID NO: 11131 - DNA, 23 bp, Artificial Sequence
  human ApoB siRNA sequence
aatgctaacactaagaaccagaa

SEQ ID NO: 11132 - DNA, 23 bp, Artificial Sequence
  human ApoB siRNA sequence
atgctaacactaagaaccagaag

SEQ ID NO: 11133 - DNA, 23 bp, Artificial Sequence
  human ApoB siRNA sequence
tgctaacactaagaaccagaaga

SEQ ID NO: 11134 - DNA, 23 bp, Artificial Sequence
  human ApoB siRNA sequence
gctaacactaagaaccagaagat

SEQ ID NO: 11135 - DNA, 23 bp, Artificial Sequence
  human ApoB siRNA sequence
ctaacactaagaaccagaagatc

SEQ ID NO: 11136 - DNA, 23 bp, Artificial Sequence
  human ApoB siRNA sequence
taacactaagaaccagaagatca

SEQ ID NO: 11137 - DNA, 23 bp, Artificial Sequence
  human ApoB siRNA sequence
aacactaagaaccagaagatcag

SEQ ID NO: 11138 - DNA, 23 bp, Artificial Sequence
  human ApoB siRNA sequence
acactaagaaccagaagatcaga

SEQ ID NO: 11139 - DNA, 23 bp, Artificial Sequence
  human ApoB siRNA sequence
cactaagaaccagaagatcagat

SEQ ID NO: 11140 - DNA, 23 bp, Artificial Sequence
  human ApoB siRNA sequence
actaagaaccagaagatcagatg

SEQ ID NO: 11141 - DNA, 23 bp, Artificial Sequence
  human ApoB siRNA sequence
ctaagaaccagaagatcagatgg

SEQ ID NO: 11142 - DNA, 23 bp, Artificial Sequence
  human ApoB siRNA sequence
taagaaccagaagatcagatgga

SEQ ID NO: 11143 - DNA, 23 bp, Artificial Sequence
  human ApoB siRNA sequence
aagaaccagaagatcagatggaa

SEQ ID NO: 11144 - DNA, 23 bp, Artificial Sequence
  human ApoB siRNA sequence
agaaccagaagatcagatggaaa

SEQ ID NO: 11145 - DNA, 23 bp, Artificial Sequence
  human ApoB siRNA sequence
gaaccagaagatcagatggaaaa

SEQ ID NO: 11146 - DNA, 23 bp, Artificial Sequence
  human ApoB siRNA sequence
aaccagaagatcagatggaaaaa

SEQ ID NO: 11147 - DNA, 23 bp, Artificial Sequence
  human ApoB siRNA sequence
accagaagatcagatggaaaaat

SEQ ID NO: 11148 - DNA, 23 bp, Artificial Sequence
  human ApoB siRNA sequence
ccagaagatcagatggaaaaatg

SEQ ID NO: 11149 - DNA, 23 bp, Artificial Sequence
  human ApoB siRNA sequence
cagaagatcagatggaaaaatga

SEQ ID NO: 11150 - DNA, 23 bp, Artificial Sequence
  human ApoB siRNA sequence
agaagatcagatggaaaaatgaa

SEQ ID NO: 11151 - DNA, 23 bp, Artificial Sequence
  human ApoB siRNA sequence
gaagatcagatggaaaaatgaag

SEQ ID NO: 11152 - DNA, 23 bp, Artificial Sequence
  human ApoB siRNA sequence
aagatcagatggaaaaatgaagt

SEQ ID NO: 11153 - DNA, 23 bp, Artificial Sequence
  human ApoB siRNA sequence
agatcagatggaaaaatgaagtc

SEQ ID NO: 11154 - DNA, 23 bp, Artificial Sequence
  human ApoB siRNA sequence
gatcagatggaaaaatgaagtcc

SEQ ID NO: 11155 - DNA, 23 bp, Artificial Sequence
  human ApoB siRNA sequence
atcagatggaaaaatgaagtccg

SEQ ID NO: 11156 - DNA, 23 bp, Artificial Sequence
  human ApoB siRNA sequence
tcagatggaaaaatgaagtccgg

SEQ ID NO: 11157 - DNA, 23 bp, Artificial Sequence
  human ApoB siRNA sequence
cagatggaaaaatgaagtccgga

SEQ ID NO: 11158 - DNA, 23 bp, Artificial Sequence
  human ApoB siRNA sequence
agatggaaaaatgaagtccggat

SEQ ID NO: 11159 - DNA, 23 bp, Artificial Sequence
  human ApoB siRNA sequence
gatggaaaaatgaagtccggatt

SEQ ID NO: 11160 - DNA, 23 bp, Artificial Sequence
  human ApoB siRNA sequence
atggaaaaatgaagtccggattc

SEQ ID NO: 11161 - DNA, 23 bp, Artificial Sequence
  human ApoB siRNA sequence
tggaaaaatgaagtccggattca

SEQ ID NO: 11162 - DNA, 23 bp, Artificial Sequence
  human ApoB siRNA sequence
ggaaaaatgaagtccggattcat

SEQ ID NO: 11163 - DNA, 23 bp, Artificial Sequence
  human ApoB siRNA sequence
gaaaaatgaagtccggattcatt

SEQ ID NO: 11164 - DNA, 23 bp, Artificial Sequence
  human ApoB siRNA sequence
aaaaatgaagtccggattcattc

SEQ ID NO: 11165 - DNA, 23 bp, Artificial Sequence
  human ApoB siRNA sequence
aaaatgaagtccggattcattct

SEQ ID NO: 11166 - DNA, 23 bp, Artificial Sequence
  human ApoB siRNA sequence
aaatgaagtccggattcattctg

SEQ ID NO: 11167 - DNA, 23 bp, Artificial Sequence
  human ApoB siRNA sequence
aatgaagtccggattcattctgg

SEQ ID NO: 11168 - DNA, 23 bp, Artificial Sequence
  human ApoB siRNA sequence
atgaagtccggattcattctggg

SEQ ID NO: 11169 - DNA, 23 bp, Artificial Sequence
  human ApoB siRNA sequence
tgaagtccggattcattctgggt

SEQ ID NO: 11170 - DNA, 23 bp, Artificial Sequence
  human ApoB siRNA sequence
gaagtccggattcattctgggtc

SEQ ID NO: 11171 - DNA, 23 bp, Artificial Sequence
  human ApoB siRNA sequence
aagtccggattcattctgggtct

SEQ ID NO: 11172 - DNA, 23 bp, Artificial Sequence
  human ApoB siRNA sequence
agtccggattcattctgggtctt

SEQ ID NO: 11173 - DNA, 23 bp, Artificial Sequence
  human ApoB siRNA sequence
gtccggattcattctgggtcttt

SEQ ID NO: 11174 - DNA, 23 bp, Artificial Sequence
  human ApoB siRNA sequence
tccggattcattctgggtctttc

SEQ ID NO: 11175 - DNA, 23 bp, Artificial Sequence
  human ApoB siRNA sequence
ccggattcattctgggtctttcc

SEQ ID NO: 11176 - DNA, 23 bp, Artificial Sequence
  human ApoB siRNA sequence
cggattcattctgggtctttcca

SEQ ID NO: 11177 - DNA, 23 bp, Artificial Sequence
  human ApoB siRNA sequence
ggattcattctgggtctttccag

SEQ ID NO: 11178 - DNA, 23 bp, Artificial Sequence
  human ApoB siRNA sequence
gattcattctgggtctttccaga

SEQ ID NO: 11179 - DNA, 23 bp, Artificial Sequence
  human ApoB siRNA sequence
attcattctgggtctttccagag

SEQ ID NO: 11180 - DNA, 23 bp, Artificial Sequence
  human ApoB siRNA sequence
ttcattctgggtctttccagagc

SEQ ID NO: 11181 - DNA, 23 bp, Artificial Sequence
  human ApoB siRNA sequence
tcattctgggtctttccagagcc

SEQ ID NO: 11182 - DNA, 23 bp, Artificial Sequence
  human ApoB siRNA sequence
cattctgggtctttccagagcca

SEQ ID NO: 11183 - DNA, 23 bp, Artificial Sequence
  human ApoB siRNA sequence
attctgggtctttccagagccag

SEQ ID NO: 11184 - DNA, 23 bp, Artificial Sequence
  human ApoB siRNA sequence
ttctgggtctttccagagccagg

SEQ ID NO: 11185 - DNA, 23 bp, Artificial Sequence
  human ApoB siRNA sequence
tctgggtctttccagagccaggt

SEQ ID NO: 11186 - DNA, 23 bp, Artificial Sequence
  human ApoB siRNA sequence
ctgggtctttccagagccaggtc

SEQ ID NO: 11187 - DNA, 23 bp, Artificial Sequence
  human ApoB siRNA sequence
tgggtctttccagagccaggtcg

SEQ ID NO: 11188 - DNA, 23 bp, Artificial Sequence
  human ApoB siRNA sequence
gggtctttccagagccaggtcga

SEQ ID NO: 11189 - DNA, 23 bp, Artificial Sequence
  human ApoB siRNA sequence
ggtctttccagagccaggtcgag

SEQ ID NO: 11190 - DNA, 23 bp, Artificial Sequence
  human ApoB siRNA sequence
gtctttccagagccaggtcgagc

SEQ ID NO: 11191 - DNA, 23 bp, Artificial Sequence
  human ApoB siRNA sequence
tctttccagagccaggtcgagct

SEQ ID NO: 11192 - DNA, 23 bp, Artificial Sequence
  human ApoB siRNA sequence
ctttccagagccaggtcgagctt

SEQ ID NO: 11193 - DNA, 23 bp, Artificial Sequence
  human ApoB siRNA sequence
tttccagagccaggtcgagcttt

SEQ ID NO: 11194 - DNA, 23 bp, Artificial Sequence
  human ApoB siRNA sequence
ttccagagccaggtcgagctttc

SEQ ID NO: 11195 - DNA, 23 bp, Artificial Sequence
  human ApoB siRNA sequence
tccagagccaggtcgagctttcc

SEQ ID NO: 11196 - DNA, 23 bp, Artificial Sequence
  human ApoB siRNA sequence
ccagagccaggtcgagctttcca

SEQ ID NO: 11197 - DNA, 23 bp, Artificial Sequence
  human ApoB siRNA sequence
cagagccaggtcgagctttccaa

SEQ ID NO: 11198 - DNA, 23 bp, Artificial Sequence
  human ApoB siRNA sequence
agagccaggtcgagctttccaat

SEQ ID NO: 11199 - DNA, 23 bp, Artificial Sequence
  human ApoB siRNA sequence
gagccaggtcgagctttccaatg

SEQ ID NO: 11200 - DNA, 23 bp, Artificial Sequence
  human ApoB siRNA sequence
agccaggtcgagctttccaatga

SEQ ID NO: 11201 - DNA, 23 bp, Artificial Sequence
  human ApoB siRNA sequence
gccaggtcgagctttccaatgac

SEQ ID NO: 11202 - DNA, 23 bp, Artificial Sequence
  human ApoB siRNA sequence
ccaggtcgagctttccaatgacc

SEQ ID NO: 11203 - DNA, 23 bp, Artificial Sequence
  human ApoB siRNA sequence
caggtcgagctttccaatgacca

SEQ ID NO: 11204 - DNA, 23 bp, Artificial Sequence
  human ApoB siRNA sequence
aggtcgagctttccaatgaccaa

SEQ ID NO: 11205 - DNA, 23 bp, Artificial Sequence
  human ApoB siRNA sequence
ggtcgagctttccaatgaccaag

SEQ ID NO: 11206 - DNA, 23 bp, Artificial Sequence
  human ApoB siRNA sequence
gtcgagctttccaatgaccaaga

SEQ ID NO: 11207 - DNA, 23 bp, Artificial Sequence
  human ApoB siRNA sequence
tcgagctttccaatgaccaagaa

SEQ ID NO: 11208 - DNA, 23 bp, Artificial Sequence
  human ApoB siRNA sequence
cgagctttccaatgaccaagaaa

SEQ ID NO: 11209 - DNA, 23 bp, Artificial Sequence
  human ApoB siRNA sequence
gagctttccaatgaccaagaaaa

SEQ ID NO: 11210 - DNA, 23 bp, Artificial Sequence
  human ApoB siRNA sequence
agctttccaatgaccaagaaaag

SEQ ID NO: 11211 - DNA, 23 bp, Artificial Sequence
  human ApoB siRNA sequence
gctttccaatgaccaagaaaagg

SEQ ID NO: 11212 - DNA, 23 bp, Artificial Sequence
  human ApoB siRNA sequence
ctttccaatgaccaagaaaaggc

SEQ ID NO: 11213 - DNA, 23 bp, Artificial Sequence
  human ApoB siRNA sequence
tttccaatgaccaagaaaaggca

SEQ ID NO: 11214 - DNA, 23 bp, Artificial Sequence
  human ApoB siRNA sequence
ttccaatgaccaagaaaaggcac

SEQ ID NO: 11215 - DNA, 23 bp, Artificial Sequence
  human ApoB siRNA sequence
tccaatgaccaagaaaaggcaca

SEQ ID NO: 11216 - DNA, 23 bp, Artificial Sequence
  human ApoB siRNA sequence
ccaatgaccaagaaaaggcacac

SEQ ID NO: 11217 - DNA, 23 bp, Artificial Sequence
  human ApoB siRNA sequence
caatgaccaagaaaaggcacacc

SEQ ID NO: 11218 - DNA, 23 bp, Artificial Sequence
  human ApoB siRNA sequence
aatgaccaagaaaaggcacacct

SEQ ID NO: 11219 - DNA, 23 bp, Artificial Sequence
  human ApoB siRNA sequence
atgaccaagaaaaggcacacctt

SEQ ID NO: 11220 - DNA, 23 bp, Artificial Sequence
  human ApoB siRNA sequence
tgaccaagaaaaggcacaccttg

SEQ ID NO: 11221 - DNA, 23 bp, Artificial Sequence
  human ApoB siRNA sequence
gaccaagaaaaggcacaccttga

SEQ ID NO: 11222 - DNA, 23 bp, Artificial Sequence
  human ApoB siRNA sequence
accaagaaaaggcacaccttgac

SEQ ID NO: 11223 - DNA, 23 bp, Artificial Sequence
  human ApoB siRNA sequence
ccaagaaaaggcacaccttgaca

SEQ ID NO: 11224 - DNA, 23 bp, Artificial Sequence
  human ApoB siRNA sequence
caagaaaaggcacaccttgacat

SEQ ID NO: 11225 - DNA, 23 bp, Artificial Sequence
  human ApoB siRNA sequence
aagaaaaggcacaccttgacatt

SEQ ID NO: 11226 - DNA, 23 bp, Artificial Sequence
  human ApoB siRNA sequence
agaaaaggcacaccttgacattg

SEQ ID NO: 11227 - DNA, 23 bp, Artificial Sequence
  human ApoB siRNA sequence
gaaaaggcacaccttgacattgc

SEQ ID NO: 11228 - DNA, 23 bp, Artificial Sequence
  human ApoB siRNA sequence
aaaaggcacaccttgacattgca

SEQ ID NO: 11229 - DNA, 23 bp, Artificial Sequence
  human ApoB siRNA sequence
aaaggcacaccttgacattgcag

SEQ ID NO: 11230 - DNA, 23 bp, Artificial Sequence
  human ApoB siRNA sequence
aaggcacaccttgacattgcagg

SEQ ID NO: 11231 - DNA, 23 bp, Artificial Sequence
  human ApoB siRNA sequence
aggcacaccttgacattgcagga

SEQ ID NO: 11232 - DNA, 23 bp, Artificial Sequence
  human ApoB siRNA sequence
ggcacaccttgacattgcaggat

SEQ ID NO: 11233 - DNA, 23 bp, Artificial Sequence
  human ApoB siRNA sequence
gcacaccttgacattgcaggatc

SEQ ID NO: 11234 - DNA, 23 bp, Artificial Sequence
  human ApoB siRNA sequence
cacaccttgacattgcaggatcc

SEQ ID NO: 11235 - DNA, 23 bp, Artificial Sequence
  human ApoB siRNA sequence
acaccttgacattgcaggatcct

SEQ ID NO: 11236 - DNA, 23 bp, Artificial Sequence
  human ApoB siRNA sequence
caccttgacattgcaggatcctt

SEQ ID NO: 11237 - DNA, 23 bp, Artificial Sequence
  human ApoB siRNA sequence
accttgacattgcaggatcctta

SEQ ID NO: 11238 - DNA, 23 bp, Artificial Sequence
  human ApoB siRNA sequence
ccttgacattgcaggatccttag

SEQ ID NO: 11239 - DNA, 23 bp, Artificial Sequence
  human ApoB siRNA sequence
cttgacattgcaggatccttaga

SEQ ID NO: 11240 - DNA, 23 bp, Artificial Sequence
  human ApoB siRNA sequence
ttgacattgcaggatccttagaa

SEQ ID NO: 11241 - DNA, 23 bp, Artificial Sequence
  human ApoB siRNA sequence
tgacattgcaggatccttagaag

SEQ ID NO: 11242 - DNA, 23 bp, Artificial Sequence
  human ApoB siRNA sequence
gacattgcaggatccttagaagg

SEQ ID NO: 11243 - DNA, 23 bp, Artificial Sequence
  human ApoB siRNA sequence
acattgcaggatccttagaagga

SEQ ID NO: 11244 - DNA, 23 bp, Artificial Sequence
  human ApoB siRNA sequence
cattgcaggatccttagaaggac

SEQ ID NO: 11245 - DNA, 23 bp, Artificial Sequence
  human ApoB siRNA sequence
attgcaggatccttagaaggaca

SEQ ID NO: 11246 - DNA, 23 bp, Artificial Sequence
  human ApoB siRNA sequence
ttgcaggatccttagaaggacac

SEQ ID NO: 11247 - DNA, 23 bp, Artificial Sequence
  human ApoB siRNA sequence
tgcaggatccttagaaggacacc

SEQ ID NO: 11248 - DNA, 23 bp, Artificial Sequence
  human ApoB siRNA sequence
gcaggatccttagaaggacacct

SEQ ID NO: 11249 - DNA, 23 bp, Artificial Sequence
  human ApoB siRNA sequence
caggatccttagaaggacaccta

SEQ ID NO: 11250 - DNA, 23 bp, Artificial Sequence
  human ApoB siRNA sequence
aggatccttagaaggacacctaa

SEQ ID NO: 11251 - DNA, 23 bp, Artificial Sequence
  human ApoB siRNA sequence
ggatccttagaaggacacctaag

SEQ ID NO: 11252 - DNA, 23 bp, Artificial Sequence
  human ApoB siRNA sequence
gatccttagaaggacacctaagg

SEQ ID NO: 11253 - DNA, 23 bp, Artificial Sequence
  human ApoB siRNA sequence
atccttagaaggacacctaaggt

SEQ ID NO: 11254 - DNA, 23 bp, Artificial Sequence
  human ApoB siRNA sequence
tccttagaaggacacctaaggtt

SEQ ID NO: 11255 - DNA, 23 bp, Artificial Sequence
  human ApoB siRNA sequence
ccttagaaggacacctaaggttc

SEQ ID NO: 11256 - DNA, 23 bp, Artificial Sequence
  human ApoB siRNA sequence
cttagaaggacacctaaggttcc

SEQ ID NO: 11257 - DNA, 23 bp, Artificial Sequence
  human ApoB siRNA sequence
ttagaaggacacctaaggttcct

SEQ ID NO: 11258 - DNA, 23 bp, Artificial Sequence
  human ApoB siRNA sequence
tagaaggacacctaaggttcctc

SEQ ID NO: 11259 - DNA, 23 bp, Artificial Sequence
  human ApoB siRNA sequence
agaaggacacctaaggttcctca

SEQ ID NO: 11260 - DNA, 23 bp, Artificial Sequence
  human ApoB siRNA sequence
gaaggacacctaaggttcctcaa

SEQ ID NO: 11261 - DNA, 23 bp, Artificial Sequence
  human ApoB siRNA sequence
aaggacacctaaggttcctcaaa

SEQ ID NO: 11262 - DNA, 23 bp, Artificial Sequence
  human ApoB siRNA sequence
aggacacctaaggttcctcaaaa

SEQ ID NO: 11263 - DNA, 23 bp, Artificial Sequence
  human ApoB siRNA sequence
ggacacctaaggttcctcaaaaa

SEQ ID NO: 11264 - DNA, 23 bp, Artificial Sequence
  human ApoB siRNA sequence
gacacctaaggttcctcaaaaat

SEQ ID NO: 11265 - DNA, 23 bp, Artificial Sequence
  human ApoB siRNA sequence
acacctaaggttcctcaaaaata

SEQ ID NO: 11266 - DNA, 23 bp, Artificial Sequence
  human ApoB siRNA sequence
cacctaaggttcctcaaaaatat

SEQ ID NO: 11267 - DNA, 23 bp, Artificial Sequence
  human ApoB siRNA sequence
acctaaggttcctcaaaaatatc

SEQ ID NO: 11268 - DNA, 23 bp, Artificial Sequence
  human ApoB siRNA sequence
cctaaggttcctcaaaaatatca

SEQ ID NO: 11269 - DNA, 23 bp, Artificial Sequence
  human ApoB siRNA sequence
ctaaggttcctcaaaaatatcat

SEQ ID NO: 11270 - DNA, 23 bp, Artificial Sequence
  human ApoB siRNA sequence
taaggttcctcaaaaatatcatc

SEQ ID NO: 11271 - DNA, 23 bp, Artificial Sequence
  human ApoB siRNA sequence
aaggttcctcaaaaatatcatcc

SEQ ID NO: 11272 - DNA, 23 bp, Artificial Sequence
  human ApoB siRNA sequence
aggttcctcaaaaatatcatcct

SEQ ID NO: 11273 - DNA, 23 bp, Artificial Sequence
  human ApoB siRNA sequence
ggttcctcaaaaatatcatccta

SEQ ID NO: 11274 - DNA, 23 bp, Artificial Sequence
  human ApoB siRNA sequence
gttcctcaaaaatatcatcctac

SEQ ID NO: 11275 - DNA, 23 bp, Artificial Sequence
  human ApoB siRNA sequence
ttcctcaaaaatatcatcctacc

SEQ ID NO: 11276 - DNA, 23 bp, Artificial Sequence
  human ApoB siRNA sequence
tcctcaaaaatatcatcctacca

SEQ ID NO: 11277 - DNA, 23 bp, Artificial Sequence
  human ApoB siRNA sequence
cctcaaaaatatcatcctaccag

SEQ ID NO: 11278 - DNA, 23 bp, Artificial Sequence
  human ApoB siRNA sequence
ctcaaaaatatcatcctaccagt

SEQ ID NO: 11279 - DNA, 23 bp, Artificial Sequence
  human ApoB siRNA sequence
tcaaaaatatcatcctaccagtc

SEQ ID NO: 11280 - DNA, 23 bp, Artificial Sequence
  human ApoB siRNA sequence
caaaaatatcatcctaccagtct

SEQ ID NO: 11281 - DNA, 23 bp, Artificial Sequence
  human ApoB siRNA sequence
aaaaatatcatcctaccagtcta

SEQ ID NO: 11282 - DNA, 23 bp, Artificial Sequence
  human ApoB siRNA sequence
aaaatatcatcctaccagtctat

SEQ ID NO: 11283 - DNA, 23 bp, Artificial Sequence
  human ApoB siRNA sequence
aaatatcatcctaccagtctatg

SEQ ID NO: 11284 - DNA, 23 bp, Artificial Sequence
  human ApoB siRNA sequence
aatatcatcctaccagtctatga

SEQ ID NO: 11285 - DNA, 23 bp, Artificial Sequence
  human ApoB siRNA sequence
atatcatcctaccagtctatgac

SEQ ID NO: 11286 - DNA, 23 bp, Artificial Sequence
  human ApoB siRNA sequence
tatcatcctaccagtctatgaca

SEQ ID NO: 11287 - DNA, 23 bp, Artificial Sequence
  human ApoB siRNA sequence
atcatcctaccagtctatgacaa

SEQ ID NO: 11288 - DNA, 23 bp, Artificial Sequence
  human ApoB siRNA sequence
tcatcctaccagtctatgacaag

SEQ ID NO: 11289 - DNA, 23 bp, Artificial Sequence
  human ApoB siRNA sequence
catcctaccagtctatgacaaga

SEQ ID NO: 11290 - DNA, 23 bp, Artificial Sequence
  human ApoB siRNA sequence
atcctaccagtctatgacaagag

SEQ ID NO: 11291 - DNA, 23 bp, Artificial Sequence
  human ApoB siRNA sequence
tcctaccagtctatgacaagagc

SEQ ID NO: 11292 - DNA, 23 bp, Artificial Sequence
  human ApoB siRNA sequence
cctaccagtctatgacaagagct

SEQ ID NO: 11293 - DNA, 23 bp, Artificial Sequence
  human ApoB siRNA sequence
ctaccagtctatgacaagagctt

SEQ ID NO: 11294 - DNA, 23 bp, Artificial Sequence
  human ApoB siRNA sequence
taccagtctatgacaagagctta

SEQ ID NO: 11295 - DNA, 23 bp, Artificial Sequence
  human ApoB siRNA sequence
accagtctatgacaagagcttat

SEQ ID NO: 11296 - DNA, 23 bp, Artificial Sequence
  human ApoB siRNA sequence
ccagtctatgacaagagcttatg

SEQ ID NO: 11297 - DNA, 23 bp, Artificial Sequence
  human ApoB siRNA sequence
cagtctatgacaagagcttatgg

SEQ ID NO: 11298 - DNA, 23 bp, Artificial Sequence
  human ApoB siRNA sequence
agtctatgacaagagcttatggg

SEQ ID NO: 11299 - DNA, 23 bp, Artificial Sequence
  human ApoB siRNA sequence
gtctatgacaagagcttatggga

SEQ ID NO: 11300 - DNA, 23 bp, Artificial Sequence
  human ApoB siRNA sequence
tctatgacaagagcttatgggat

SEQ ID NO: 11301 - DNA, 23 bp, Artificial Sequence
  human ApoB siRNA sequence
ctatgacaagagcttatgggatt

SEQ ID NO: 11302 - DNA, 23 bp, Artificial Sequence
  human ApoB siRNA sequence
tatgacaagagcttatgggattt

SEQ ID NO: 11303 - DNA, 23 bp, Artificial Sequence
  human ApoB siRNA sequence
atgacaagagcttatgggatttc

SEQ ID NO: 11304 - DNA, 23 bp, Artificial Sequence
  human ApoB siRNA sequence
tgacaagagcttatgggatttcc

SEQ ID NO: 11305 - DNA, 23 bp, Artificial Sequence
  human ApoB siRNA sequence
gacaagagcttatgggatttcct

SEQ ID NO: 11306 - DNA, 23 bp, Artificial Sequence
  human ApoB siRNA sequence
acaagagcttatgggatttccta

SEQ ID NO: 11307 - DNA, 23 bp, Artificial Sequence
  human ApoB siRNA sequence
caagagcttatgggatttcctaa

SEQ ID NO: 11308 - DNA, 23 bp, Artificial Sequence
  human ApoB siRNA sequence
aagagcttatgggatttcctaaa

SEQ ID NO: 11309 - DNA, 23 bp, Artificial Sequence
  human ApoB siRNA sequence
agagcttatgggatttcctaaag

SEQ ID NO: 11310 - DNA, 23 bp, Artificial Sequence
  human ApoB siRNA sequence
gagcttatgggatttcctaaagc

SEQ ID NO: 11311 - DNA, 23 bp, Artificial Sequence
  human ApoB siRNA sequence
agcttatgggatttcctaaagct

SEQ ID NO: 11312 - DNA, 23 bp, Artificial Sequence
  human ApoB siRNA sequence
gcttatgggatttcctaaagctg

SEQ ID NO: 11313 - DNA, 23 bp, Artificial Sequence
  human ApoB siRNA sequence
cttatgggatttcctaaagctgg

SEQ ID NO: 11314 - DNA, 23 bp, Artificial Sequence
  human ApoB siRNA sequence
ttatgggatttcctaaagctgga

SEQ ID NO: 11315 - DNA, 23 bp, Artificial Sequence
  human ApoB siRNA sequence
tatgggatttcctaaagctggat

SEQ ID NO: 11316 - DNA, 23 bp, Artificial Sequence
  human ApoB siRNA sequence
atgggatttcctaaagctggatg

SEQ ID NO: 11317 - DNA, 23 bp, Artificial Sequence
  human ApoB siRNA sequence
tgggatttcctaaagctggatgt

SEQ ID NO: 11318 - DNA, 23 bp, Artificial Sequence
  human ApoB siRNA sequence
gggatttcctaaagctggatgta

SEQ ID NO: 11319 - DNA, 23 bp, Artificial Sequence
  human ApoB siRNA sequence
ggatttcctaaagctggatgtaa

SEQ ID NO: 11320 - DNA, 23 bp, Artificial Sequence
  human ApoB siRNA sequence
gatttcctaaagctggatgtaac

SEQ ID NO: 11321 - DNA, 23 bp, Artificial Sequence
  human ApoB siRNA sequence
atttcctaaagctggatgtaacc

SEQ ID NO: 11322 - DNA, 23 bp, Artificial Sequence
  human ApoB siRNA sequence
tttcctaaagctggatgtaacca

SEQ ID NO: 11323 - DNA, 23 bp, Artificial Sequence
  human ApoB siRNA sequence
ttcctaaagctggatgtaaccac

SEQ ID NO: 11324 - DNA, 23 bp, Artificial Sequence
  human ApoB siRNA sequence
tcctaaagctggatgtaaccacc

SEQ ID NO: 11325 - DNA, 23 bp, Artificial Sequence
  human ApoB siRNA sequence
cctaaagctggatgtaaccacca

SEQ ID NO: 11326 - DNA, 23 bp, Artificial Sequence
  human ApoB siRNA sequence
ctaaagctggatgtaaccaccag

SEQ ID NO: 11327 - DNA, 23 bp, Artificial Sequence
  human ApoB siRNA sequence
taaagctggatgtaaccaccagc

SEQ ID NO: 11328 - DNA, 23 bp, Artificial Sequence
  human ApoB siRNA sequence
aaagctggatgtaaccaccagca

SEQ ID NO: 11329 - DNA, 23 bp, Artificial Sequence
  human ApoB siRNA sequence
aagctggatgtaaccaccagcat

SEQ ID NO: 11330 - DNA, 23 bp, Artificial Sequence
  human ApoB siRNA sequence
agctggatgtaaccaccagcatt

SEQ ID NO: 11331 - DNA, 23 bp, Artificial Sequence
  human ApoB siRNA sequence
gctggatgtaaccaccagcattg

SEQ ID NO: 11332 - DNA, 23 bp, Artificial Sequence
  human ApoB siRNA sequence
ctggatgtaaccaccagcattgg

SEQ ID NO: 11333 - DNA, 23 bp, Artificial Sequence
  human ApoB siRNA sequence
tggatgtaaccaccagcattggt

SEQ ID NO: 11334 - DNA, 23 bp, Artificial Sequence
  human ApoB siRNA sequence
ggatgtaaccaccagcattggta

SEQ ID NO: 11335 - DNA, 23 bp, Artificial Sequence
  human ApoB siRNA sequence
gatgtaaccaccagcattggtag

SEQ ID NO: 11336 - DNA, 23 bp, Artificial Sequence
  human ApoB siRNA sequence
atgtaaccaccagcattggtagg

SEQ ID NO: 11337 - DNA, 23 bp, Artificial Sequence
  human ApoB siRNA sequence
tgtaaccaccagcattggtagga

SEQ ID NO: 11338 - DNA, 23 bp, Artificial Sequence
  human ApoB siRNA sequence
gtaaccaccagcattggtaggag

SEQ ID NO: 11339 - DNA, 23 bp, Artificial Sequence
  human ApoB siRNA sequence
taaccaccagcattggtaggaga

SEQ ID NO: 11340 - DNA, 23 bp, Artificial Sequence
  human ApoB siRNA sequence
aaccaccagcattggtaggagac

SEQ ID NO: 11341 - DNA, 23 bp, Artificial Sequence
  human ApoB siRNA sequence
accaccagcattggtaggagaca

SEQ ID NO: 11342 - DNA, 23 bp, Artificial Sequence
  human ApoB siRNA sequence
ccaccagcattggtaggagacag

SEQ ID NO: 11343 - DNA, 23 bp, Artificial Sequence
  human ApoB siRNA sequence
caccagcattggtaggagacagc

SEQ ID NO: 11344 - DNA, 23 bp, Artificial Sequence
  human ApoB siRNA sequence
accagcattggtaggagacagca

SEQ ID NO: 11345 - DNA, 23 bp, Artificial Sequence
  human ApoB siRNA sequence
ccagcattggtaggagacagcat

SEQ ID NO: 11346 - DNA, 23 bp, Artificial Sequence
  human ApoB siRNA sequence
cagcattggtaggagacagcatc

SEQ ID NO: 11347 - DNA, 23 bp, Artificial Sequence
  human ApoB siRNA sequence
agcattggtaggagacagcatct

SEQ ID NO: 11348 - DNA, 23 bp, Artificial Sequence
  human ApoB siRNA sequence
gcattggtaggagacagcatctt

SEQ ID NO: 11349 - DNA, 23 bp, Artificial Sequence
  human ApoB siRNA sequence
cattggtaggagacagcatcttc

SEQ ID NO: 11350 - DNA, 23 bp, Artificial Sequence
  human ApoB siRNA sequence
attggtaggagacagcatcttcg

SEQ ID NO: 11351 - DNA, 23 bp, Artificial Sequence
  human ApoB siRNA sequence
ttggtaggagacagcatcttcgt

SEQ ID NO: 11352 - DNA, 23 bp, Artificial Sequence
  human ApoB siRNA sequence
tggtaggagacagcatcttcgtg

SEQ ID NO: 11353 - DNA, 23 bp, Artificial Sequence
  human ApoB siRNA sequence
ggtaggagacagcatcttcgtgt

SEQ ID NO: 11354 - DNA, 23 bp, Artificial Sequence
  human ApoB siRNA sequence
gtaggagacagcatcttcgtgtt

SEQ ID NO: 11355 - DNA, 23 bp, Artificial Sequence
  human ApoB siRNA sequence
taggagacagcatcttcgtgttt

SEQ ID NO: 11356 - DNA, 23 bp, Artificial Sequence
  human ApoB siRNA sequence
aggagacagcatcttcgtgtttc

SEQ ID NO: 11357 - DNA, 23 bp, Artificial Sequence
  human ApoB siRNA sequence
ggagacagcatcttcgtgtttca

SEQ ID NO: 11358 - DNA, 23 bp, Artificial Sequence
  human ApoB siRNA sequence
gagacagcatcttcgtgtttcaa

SEQ ID NO: 11359 - DNA, 23 bp, Artificial Sequence
  human ApoB siRNA sequence
agacagcatcttcgtgtttcaac

SEQ ID NO: 11360 - DNA, 23 bp, Artificial Sequence
  human ApoB siRNA sequence
gacagcatcttcgtgtttcaact

SEQ ID NO: 11361 - DNA, 23 bp, Artificial Sequence
  human ApoB siRNA sequence
acagcatcttcgtgtttcaactg

SEQ ID NO: 11362 - DNA, 23 bp, Artificial Sequence
  human ApoB siRNA sequence
cagcatcttcgtgtttcaactgc

SEQ ID NO: 11363 - DNA, 23 bp, Artificial Sequence
  human ApoB siRNA sequence
agcatcttcgtgtttcaactgcc

SEQ ID NO: 11364 - DNA, 23 bp, Artificial Sequence
  human ApoB siRNA sequence
gcatcttcgtgtttcaactgcct

SEQ ID NO: 11365 - DNA, 23 bp, Artificial Sequence
  human ApoB siRNA sequence
catcttcgtgtttcaactgcctt

SEQ ID NO: 11366 - DNA, 23 bp, Artificial Sequence
  human ApoB siRNA sequence
atcttcgtgtttcaactgccttt

SEQ ID NO: 11367 - DNA, 23 bp, Artificial Sequence
  human ApoB siRNA sequence
tcttcgtgtttcaactgcctttg

SEQ ID NO: 11368 - DNA, 23 bp, Artificial Sequence
  human ApoB siRNA sequence
cttcgtgtttcaactgcctttgt

SEQ ID NO: 11369 - DNA, 23 bp, Artificial Sequence
  human ApoB siRNA sequence
ttcgtgtttcaactgcctttgtg

SEQ ID NO: 11370 - DNA, 23 bp, Artificial Sequence
  human ApoB siRNA sequence
tcgtgtttcaactgcctttgtgt

SEQ ID NO: 11371 - DNA, 23 bp, Artificial Sequence
  human ApoB siRNA sequence
cgtgtttcaactgcctttgtgta

SEQ ID NO: 11372 - DNA, 23 bp, Artificial Sequence
  human ApoB siRNA sequence
gtgtttcaactgcctttgtgtac

SEQ ID NO: 11373 - DNA, 23 bp, Artificial Sequence
  human ApoB siRNA sequence
tgtttcaactgcctttgtgtaca

SEQ ID NO: 11374 - DNA, 23 bp, Artificial Sequence
  human ApoB siRNA sequence
gtttcaactgcctttgtgtacac

SEQ ID NO: 11375 - DNA, 23 bp, Artificial Sequence
  human ApoB siRNA sequence
tttcaactgcctttgtgtacacc

SEQ ID NO: 11376 - DNA, 23 bp, Artificial Sequence
  human ApoB siRNA sequence
ttcaactgcctttgtgtacacca

SEQ ID NO: 11377 - DNA, 23 bp, Artificial Sequence
  human ApoB siRNA sequence
tcaactgcctttgtgtacaccaa

SEQ ID NO: 11378 - DNA, 23 bp, Artificial Sequence
  human ApoB siRNA sequence
caactgcctttgtgtacaccaaa

SEQ ID NO: 11379 - DNA, 23 bp, Artificial Sequence
  human ApoB siRNA sequence
aactgcctttgtgtacaccaaaa

SEQ ID NO: 11380 - DNA, 23 bp, Artificial Sequence
  human ApoB siRNA sequence
actgcctttgtgtacaccaaaaa

SEQ ID NO: 11381 - DNA, 23 bp, Artificial Sequence
  human ApoB siRNA sequence
ctgcctttgtgtacaccaaaaac

SEQ ID NO: 11382 - DNA, 23 bp, Artificial Sequence
  human ApoB siRNA sequence
tgcctttgtgtacaccaaaaacc

SEQ ID NO: 11383 - DNA, 23 bp, Artificial Sequence
  human ApoB siRNA sequence
gcctttgtgtacaccaaaaaccc

SEQ ID NO: 11384 - DNA, 23 bp, Artificial Sequence
  human ApoB siRNA sequence
cctttgtgtacaccaaaaacccc

SEQ ID NO: 11385 - DNA, 23 bp, Artificial Sequence
  human ApoB siRNA sequence
ctttgtgtacaccaaaaacccca

SEQ ID NO: 11386 - DNA, 23 bp, Artificial Sequence
  human ApoB siRNA sequence
tttgtgtacaccaaaaaccccaa

SEQ ID NO: 11387 - DNA, 23 bp, Artificial Sequence
  human ApoB siRNA sequence
ttgtgtacaccaaaaaccccaat

SEQ ID NO: 11388 - DNA, 23 bp, Artificial Sequence
  human ApoB siRNA sequence
tgtgtacaccaaaaaccccaatg

SEQ ID NO: 11389 - DNA, 23 bp, Artificial Sequence
  human ApoB siRNA sequence
gtgtacaccaaaaaccccaatgg

SEQ ID NO: 11390 - DNA, 23 bp, Artificial Sequence
  human ApoB siRNA sequence
tgtacaccaaaaaccccaatggc

SEQ ID NO: 11391 - DNA, 23 bp, Artificial Sequence
  human ApoB siRNA sequence
gtacaccaaaaaccccaatggct

SEQ ID NO: 11392 - DNA, 23 bp, Artificial Sequence
  human ApoB siRNA sequence
tacaccaaaaaccccaatggcta

SEQ ID NO: 11393 - DNA, 23 bp, Artificial Sequence
  human ApoB siRNA sequence
acaccaaaaaccccaatggctat

SEQ ID NO: 11394 - DNA, 23 bp, Artificial Sequence
  human ApoB siRNA sequence
caccaaaaaccccaatggctatt

SEQ ID NO: 11395 - DNA, 23 bp, Artificial Sequence
  human ApoB siRNA sequence
accaaaaaccccaatggctattc

SEQ ID NO: 11396 - DNA, 23 bp, Artificial Sequence
  human ApoB siRNA sequence
ccaaaaaccccaatggctattca

SEQ ID NO: 11397 - DNA, 23 bp, Artificial Sequence
  human ApoB siRNA sequence
caaaaaccccaatggctattcat

SEQ ID NO: 11398 - DNA, 23 bp, Artificial Sequence
  human ApoB siRNA sequence
aaaaaccccaatggctattcatt

SEQ ID NO: 11399 - DNA, 23 bp, Artificial Sequence
  human ApoB siRNA sequence
aaaaccccaatggctattcattc

SEQ ID NO: 11400 - DNA, 23 bp, Artificial Sequence
  human ApoB siRNA sequence
aaaccccaatggctattcattct

SEQ ID NO: 11401 - DNA, 23 bp, Artificial Sequence
  human ApoB siRNA sequence
aaccccaatggctattcattctc

SEQ ID NO: 11402 - DNA, 23 bp, Artificial Sequence
  human ApoB siRNA sequence
accccaatggctattcattctcc

SEQ ID NO: 11403 - DNA, 23 bp, Artificial Sequence
  human ApoB siRNA sequence
ccccaatggctattcattctcca

SEQ ID NO: 11404 - DNA, 23 bp, Artificial Sequence
  human ApoB siRNA sequence
cccaatggctattcattctccat

SEQ ID NO: 11405 - DNA, 23 bp, Artificial Sequence
  human ApoB siRNA sequence
ccaatggctattcattctccatc

SEQ ID NO: 11406 - DNA, 23 bp, Artificial Sequence
  human ApoB siRNA sequence
caatggctattcattctccatcc

SEQ ID NO: 11407 - DNA, 23 bp, Artificial Sequence
  human ApoB siRNA sequence
aatggctattcattctccatccc

SEQ ID NO: 11408 - DNA, 23 bp, Artificial Sequence
  human ApoB siRNA sequence
atggctattcattctccatccct

SEQ ID NO: 11409 - DNA, 23 bp, Artificial Sequence
  human ApoB siRNA sequence
tggctattcattctccatccctg

SEQ ID NO: 11410 - DNA, 23 bp, Artificial Sequence
  human ApoB siRNA sequence
ggctattcattctccatccctgt

SEQ ID NO: 11411 - DNA, 23 bp, Artificial Sequence
  human ApoB siRNA sequence
gctattcattctccatccctgta

SEQ ID NO: 11412 - DNA, 23 bp, Artificial Sequence
  human ApoB siRNA sequence
ctattcattctccatccctgtaa

SEQ ID NO: 11413 - DNA, 23 bp, Artificial Sequence
  human ApoB siRNA sequence
tattcattctccatccctgtaaa

SEQ ID NO: 11414 - DNA, 23 bp, Artificial Sequence
  human ApoB siRNA sequence
attcattctccatccctgtaaaa

SEQ ID NO: 11415 - DNA, 23 bp, Artificial Sequence
  human ApoB siRNA sequence
ttcattctccatccctgtaaaag

SEQ ID NO: 11416 - DNA, 23 bp, Artificial Sequence
  human ApoB siRNA sequence
tcattctccatccctgtaaaagt

SEQ ID NO: 11417 - DNA, 23 bp, Artificial Sequence
  human ApoB siRNA sequence
cattctccatccctgtaaaagtt

SEQ ID NO: 11418 - DNA, 23 bp, Artificial Sequence
  human ApoB siRNA sequence
attctccatccctgtaaaagttt

SEQ ID NO: 11419 - DNA, 23 bp, Artificial Sequence
  human ApoB siRNA sequence
ttctccatccctgtaaaagtttt

SEQ ID NO: 11420 - DNA, 23 bp, Artificial Sequence
  human ApoB siRNA sequence
tctccatccctgtaaaagttttg

SEQ ID NO: 11421 - DNA, 23 bp, Artificial Sequence
  human ApoB siRNA sequence
ctccatccctgtaaaagttttgg

SEQ ID NO: 11422 - DNA, 23 bp, Artificial Sequence
  human ApoB siRNA sequence
tccatccctgtaaaagttttggc

SEQ ID NO: 11423 - DNA, 23 bp, Artificial Sequence
  human ApoB siRNA sequence
ccatccctgtaaaagttttggct

SEQ ID NO: 11424 - DNA, 23 bp, Artificial Sequence
  human ApoB siRNA sequence
catccctgtaaaagttttggctg

SEQ ID NO: 11425 - DNA, 23 bp, Artificial Sequence
  human ApoB siRNA sequence
atccctgtaaaagttttggctga

SEQ ID NO: 11426 - DNA, 23 bp, Artificial Sequence
  human ApoB siRNA sequence
tccctgtaaaagttttggctgat

SEQ ID NO: 11427 - DNA, 23 bp, Artificial Sequence
  human ApoB siRNA sequence
ccctgtaaaagttttggctgata

SEQ ID NO: 11428 - DNA, 23 bp, Artificial Sequence
  human ApoB siRNA sequence
cctgtaaaagttttggctgataa

SEQ ID NO: 11429 - DNA, 23 bp, Artificial Sequence
  human ApoB siRNA sequence
ctgtaaaagttttggctgataaa

SEQ ID NO: 11430 - DNA, 23 bp, Artificial Sequence
  human ApoB siRNA sequence
tgtaaaagttttggctgataaat

SEQ ID NO: 11431 - DNA, 23 bp, Artificial Sequence
  human ApoB siRNA sequence
gtaaaagttttggctgataaatt

SEQ ID NO: 11432 - DNA, 23 bp, Artificial Sequence
  human ApoB siRNA sequence
taaaagttttggctgataaattc

SEQ ID NO: 11433 - DNA, 23 bp, Artificial Sequence
  human ApoB siRNA sequence
aaaagttttggctgataaattca

SEQ ID NO: 11434 - DNA, 23 bp, Artificial Sequence
  human ApoB siRNA sequence
aaagttttggctgataaattcat

SEQ ID NO: 11435 - DNA, 23 bp, Artificial Sequence
  human ApoB siRNA sequence
aagttttggctgataaattcatt

SEQ ID NO: 11436 - DNA, 23 bp, Artificial Sequence
  human ApoB siRNA sequence
agttttggctgataaattcatta

SEQ ID NO: 11437 - DNA, 23 bp, Artificial Sequence
  human ApoB siRNA sequence
gttttggctgataaattcattac

SEQ ID NO: 11438 - DNA, 23 bp, Artificial Sequence
  human ApoB siRNA sequence
ttttggctgataaattcattact

SEQ ID NO: 11439 - DNA, 23 bp, Artificial Sequence
  human ApoB siRNA sequence
tttggctgataaattcattactc

SEQ ID NO: 11440 - DNA, 23 bp, Artificial Sequence
  human ApoB siRNA sequence
ttggctgataaattcattactcc

SEQ ID NO: 11441 - DNA, 23 bp, Artificial Sequence
  human ApoB siRNA sequence
tggctgataaattcattactcct

SEQ ID NO: 11442 - DNA, 23 bp, Artificial Sequence
  human ApoB siRNA sequence
ggctgataaattcattactcctg

SEQ ID NO: 11443 - DNA, 23 bp, Artificial Sequence
  human ApoB siRNA sequence
gctgataaattcattactcctgg

SEQ ID NO: 11444 - DNA, 23 bp, Artificial Sequence
  human ApoB siRNA sequence
ctgataaattcattactcctggg

SEQ ID NO: 11445 - DNA, 23 bp, Artificial Sequence
  human ApoB siRNA sequence
tgataaattcattactcctgggc

SEQ ID NO: 11446 - DNA, 23 bp, Artificial Sequence
  human ApoB siRNA sequence
gataaattcattactcctgggct

SEQ ID NO: 11447 - DNA, 23 bp, Artificial Sequence
  human ApoB siRNA sequence
ataaattcattactcctgggctg

SEQ ID NO: 11448 - DNA, 23 bp, Artificial Sequence
  human ApoB siRNA sequence
taaattcattactcctgggctga

SEQ ID NO: 11449 - DNA, 23 bp, Artificial Sequence
  human ApoB siRNA sequence
aaattcattactcctgggctgaa

SEQ ID NO: 11450 - DNA, 23 bp, Artificial Sequence
  human ApoB siRNA sequence
aattcattactcctgggctgaaa

SEQ ID NO: 11451 - DNA, 23 bp, Artificial Sequence
  human ApoB siRNA sequence
attcattactcctgggctgaaac

SEQ ID NO: 11452 - DNA, 23 bp, Artificial Sequence
  human ApoB siRNA sequence
ttcattactcctgggctgaaact

SEQ ID NO: 11453 - DNA, 23 bp, Artificial Sequence
  human ApoB siRNA sequence
tcattactcctgggctgaaacta

SEQ ID NO: 11454 - DNA, 23 bp, Artificial Sequence
  human ApoB siRNA sequence
cattactcctgggctgaaactaa

SEQ ID NO: 11455 - DNA, 23 bp, Artificial Sequence
  human ApoB siRNA sequence
attactcctgggctgaaactaaa

SEQ ID NO: 11456 - DNA, 23 bp, Artificial Sequence
  human ApoB siRNA sequence
ttactcctgggctgaaactaaat

SEQ ID NO: 11457 - DNA, 23 bp, Artificial Sequence
  human ApoB siRNA sequence
tactcctgggctgaaactaaatg

SEQ ID NO: 11458 - DNA, 23 bp, Artificial Sequence
  human ApoB siRNA sequence
actcctgggctgaaactaaatga

SEQ ID NO: 11459 - DNA, 23 bp, Artificial Sequence
  human ApoB siRNA sequence
ctcctgggctgaaactaaatgat

SEQ ID NO: 11460 - DNA, 23 bp, Artificial Sequence
  human ApoB siRNA sequence
tcctgggctgaaactaaatgatc

SEQ ID NO: 11461 - DNA, 23 bp, Artificial Sequence
  human ApoB siRNA sequence
cctgggctgaaactaaatgatct

SEQ ID NO: 11462 - DNA, 23 bp, Artificial Sequence
  human ApoB siRNA sequence
ctgggctgaaactaaatgatcta

SEQ ID NO: 11463 - DNA, 23 bp, Artificial Sequence
  human ApoB siRNA sequence
tgggctgaaactaaatgatctaa

SEQ ID NO: 11464 - DNA, 23 bp, Artificial Sequence
  human ApoB siRNA sequence
gggctgaaactaaatgatctaaa

SEQ ID NO: 11465 - DNA, 23 bp, Artificial Sequence
  human ApoB siRNA sequence
ggctgaaactaaatgatctaaat

SEQ ID NO: 11466 - DNA, 23 bp, Artificial Sequence
  human ApoB siRNA sequence
gctgaaactaaatgatctaaatt

SEQ ID NO: 11467 - DNA, 23 bp, Artificial Sequence
  human ApoB siRNA sequence
ctgaaactaaatgatctaaattc

SEQ ID NO: 11468 - DNA, 23 bp, Artificial Sequence
  human ApoB siRNA sequence
tgaaactaaatgatctaaattca

SEQ ID NO: 11469 - DNA, 23 bp, Artificial Sequence
  human ApoB siRNA sequence
gaaactaaatgatctaaattcag

SEQ ID NO: 11470 - DNA, 23 bp, Artificial Sequence
  human ApoB siRNA sequence
aaactaaatgatctaaattcagt

SEQ ID NO: 11471 - DNA, 23 bp, Artificial Sequence
  human ApoB siRNA sequence
aactaaatgatctaaattcagtt

SEQ ID NO: 11472 - DNA, 23 bp, Artificial Sequence
  human ApoB siRNA sequence
actaaatgatctaaattcagttc

SEQ ID NO: 11473 - DNA, 23 bp, Artificial Sequence
  human ApoB siRNA sequence
ctaaatgatctaaattcagttct

SEQ ID NO: 11474 - DNA, 23 bp, Artificial Sequence
  human ApoB siRNA sequence
taaatgatctaaattcagttctt

SEQ ID NO: 11475 - DNA, 23 bp, Artificial Sequence
  human ApoB siRNA sequence
aaatgatctaaattcagttcttg

SEQ ID NO: 11476 - DNA, 23 bp, Artificial Sequence
  human ApoB siRNA sequence
aatgatctaaattcagttcttgt

SEQ ID NO: 11477 - DNA, 23 bp, Artificial Sequence
  human ApoB siRNA sequence
atgatctaaattcagttcttgtc

SEQ ID NO: 11478 - DNA, 23 bp, Artificial Sequence
  human ApoB siRNA sequence
tgatctaaattcagttcttgtca

SEQ ID NO: 11479 - DNA, 23 bp, Artificial Sequence
  human ApoB siRNA sequence
gatctaaattcagttcttgtcat

SEQ ID NO: 11480 - DNA, 23 bp, Artificial Sequence
  human ApoB siRNA sequence
atctaaattcagttcttgtcatg

SEQ ID NO: 11481 - DNA, 23 bp, Artificial Sequence
  human ApoB siRNA sequence
tctaaattcagttcttgtcatgc

SEQ ID NO: 11482 - DNA, 23 bp, Artificial Sequence
  human ApoB siRNA sequence
ctaaattcagttcttgtcatgcc

SEQ ID NO: 11483 - DNA, 23 bp, Artificial Sequence
  human ApoB siRNA sequence
taaattcagttcttgtcatgcct

SEQ ID NO: 11484 - DNA, 23 bp, Artificial Sequence
  human ApoB siRNA sequence
aaattcagttcttgtcatgccta

SEQ ID NO: 11485 - DNA, 23 bp, Artificial Sequence
  human ApoB siRNA sequence
aattcagttcttgtcatgcctac

SEQ ID NO: 11486 - DNA, 23 bp, Artificial Sequence
  human ApoB siRNA sequence
attcagttcttgtcatgcctacg

SEQ ID NO: 11487 - DNA, 23 bp, Artificial Sequence
  human ApoB siRNA sequence
ttcagttcttgtcatgcctacgt

SEQ ID NO: 11488 - DNA, 23 bp, Artificial Sequence
  human ApoB siRNA sequence
tcagttcttgtcatgcctacgtt

SEQ ID NO: 11489 - DNA, 23 bp, Artificial Sequence
  human ApoB siRNA sequence
cagttcttgtcatgcctacgttc

SEQ ID NO: 11490 - DNA, 23 bp, Artificial Sequence
  human ApoB siRNA sequence
agttcttgtcatgcctacgttcc

SEQ ID NO: 11491 - DNA, 23 bp, Artificial Sequence
  human ApoB siRNA sequence
gttcttgtcatgcctacgttcca

SEQ ID NO: 11492 - DNA, 23 bp, Artificial Sequence
  human ApoB siRNA sequence
ttcttgtcatgcctacgttccat

SEQ ID NO: 11493 - DNA, 23 bp, Artificial Sequence
  human ApoB siRNA sequence
tcttgtcatgcctacgttccatg

SEQ ID NO: 11494 - DNA, 23 bp, Artificial Sequence
  human ApoB siRNA sequence
cttgtcatgcctacgttccatgt

SEQ ID NO: 11495 - DNA, 23 bp, Artificial Sequence
  human ApoB siRNA sequence
ttgtcatgcctacgttccatgtc

SEQ ID NO: 11496 - DNA, 23 bp, Artificial Sequence
  human ApoB siRNA sequence
tgtcatgcctacgttccatgtcc

SEQ ID NO: 11497 - DNA, 23 bp, Artificial Sequence
  human ApoB siRNA sequence
gtcatgcctacgttccatgtccc

SEQ ID NO: 11498 - DNA, 23 bp, Artificial Sequence
  human ApoB siRNA sequence
tcatgcctacgttccatgtccca

SEQ ID NO: 11499 - DNA, 23 bp, Artificial Sequence
  human ApoB siRNA sequence
catgcctacgttccatgtcccat

SEQ ID NO: 11500 - DNA, 23 bp, Artificial Sequence
  human ApoB siRNA sequence
atgcctacgttccatgtcccatt

SEQ ID NO: 11501 - DNA, 23 bp, Artificial Sequence
  human ApoB siRNA sequence
tgcctacgttccatgtcccattt

SEQ ID NO: 11502 - DNA, 23 bp, Artificial Sequence
  human ApoB siRNA sequence
gcctacgttccatgtcccattta

SEQ ID NO: 11503 - DNA, 23 bp, Artificial Sequence
  human ApoB siRNA sequence
cctacgttccatgtcccatttac

SEQ ID NO: 11504 - DNA, 23 bp, Artificial Sequence
  human ApoB siRNA sequence
ctacgttccatgtcccatttaca

SEQ ID NO: 11505 - DNA, 23 bp, Artificial Sequence
  human ApoB siRNA sequence
tacgttccatgtcccatttacag

SEQ ID NO: 11506 - DNA, 23 bp, Artificial Sequence
  human ApoB siRNA sequence
acgttccatgtcccatttacaga

SEQ ID NO: 11507 - DNA, 23 bp, Artificial Sequence
  human ApoB siRNA sequence
cgttccatgtcccatttacagat

SEQ ID NO: 11508 - DNA, 23 bp, Artificial Sequence
  human ApoB siRNA sequence
gttccatgtcccatttacagatc

SEQ ID NO: 11509 - DNA, 23 bp, Artificial Sequence
  human ApoB siRNA sequence
ttccatgtcccatttacagatct

SEQ ID NO: 11510 - DNA, 23 bp, Artificial Sequence
  human ApoB siRNA sequence
tccatgtcccatttacagatctt

SEQ ID NO: 11511 - DNA, 23 bp, Artificial Sequence
  human ApoB siRNA sequence
ccatgtcccatttacagatcttc

SEQ ID NO: 11512 - DNA, 23 bp, Artificial Sequence
  human ApoB siRNA sequence
catgtcccatttacagatcttca

SEQ ID NO: 11513 - DNA, 23 bp, Artificial Sequence
  human ApoB siRNA sequence
atgtcccatttacagatcttcag

SEQ ID NO: 11514 - DNA, 23 bp, Artificial Sequence
  human ApoB siRNA sequence
tgtcccatttacagatcttcagg

SEQ ID NO: 11515 - DNA, 23 bp, Artificial Sequence
  human ApoB siRNA sequence
gtcccatttacagatcttcaggt

SEQ ID NO: 11516 - DNA, 23 bp, Artificial Sequence
  human ApoB siRNA sequence
tcccatttacagatcttcaggtt

SEQ ID NO: 11517 - DNA, 23 bp, Artificial Sequence
  human ApoB siRNA sequence
cccatttacagatcttcaggttc

SEQ ID NO: 11518 - DNA, 23 bp, Artificial Sequence
  human ApoB siRNA sequence
ccatttacagatcttcaggttcc

SEQ ID NO: 11519 - DNA, 23 bp, Artificial Sequence
  human ApoB siRNA sequence
catttacagatcttcaggttcca

SEQ ID NO: 11520 - DNA, 23 bp, Artificial Sequence
  human ApoB siRNA sequence
atttacagatcttcaggttccat

SEQ ID NO: 11521 - DNA, 23 bp, Artificial Sequence
  human ApoB siRNA sequence
tttacagatcttcaggttccatc

SEQ ID NO: 11522 - DNA, 23 bp, Artificial Sequence
  human ApoB siRNA sequence
ttacagatcttcaggttccatcg

SEQ ID NO: 11523 - DNA, 23 bp, Artificial Sequence
  human ApoB siRNA sequence
tacagatcttcaggttccatcgt

SEQ ID NO: 11524 - DNA, 23 bp, Artificial Sequence
  human ApoB siRNA sequence
acagatcttcaggttccatcgtg

SEQ ID NO: 11525 - DNA, 23 bp, Artificial Sequence
  human ApoB siRNA sequence
cagatcttcaggttccatcgtgc

SEQ ID NO: 11526 - DNA, 23 bp, Artificial Sequence
  human ApoB siRNA sequence
agatcttcaggttccatcgtgca

SEQ ID NO: 11527 - DNA, 23 bp, Artificial Sequence
  human ApoB siRNA sequence
gatcttcaggttccatcgtgcaa

SEQ ID NO: 11528 - DNA, 23 bp, Artificial Sequence
  human ApoB siRNA sequence
atcttcaggttccatcgtgcaaa

SEQ ID NO: 11529 - DNA, 23 bp, Artificial Sequence
  human ApoB siRNA sequence
tcttcaggttccatcgtgcaaac

SEQ ID NO: 11530 - DNA, 23 bp, Artificial Sequence
  human ApoB siRNA sequence
cttcaggttccatcgtgcaaact

SEQ ID NO: 11531 - DNA, 23 bp, Artificial Sequence
  human ApoB siRNA sequence
ttcaggttccatcgtgcaaactt

SEQ ID NO: 11532 - DNA, 23 bp, Artificial Sequence
  human ApoB siRNA sequence
tcaggttccatcgtgcaaacttg

SEQ ID NO: 11533 - DNA, 23 bp, Artificial Sequence
  human ApoB siRNA sequence
caggttccatcgtgcaaacttga

SEQ ID NO: 11534 - DNA, 23 bp, Artificial Sequence
  human ApoB siRNA sequence
aggttccatcgtgcaaacttgac

SEQ ID NO: 11535 - DNA, 23 bp, Artificial Sequence
  human ApoB siRNA sequence
ggttccatcgtgcaaacttgact

SEQ ID NO: 11536 - DNA, 23 bp, Artificial Sequence
  human ApoB siRNA sequence
gttccatcgtgcaaacttgactt

SEQ ID NO: 11537 - DNA, 23 bp, Artificial Sequence
  human ApoB siRNA sequence
ttccatcgtgcaaacttgacttc

SEQ ID NO: 11538 - DNA, 23 bp, Artificial Sequence
  human ApoB siRNA sequence
tccatcgtgcaaacttgacttca

SEQ ID NO: 11539 - DNA, 23 bp, Artificial Sequence
  human ApoB siRNA sequence
ccatcgtgcaaacttgacttcag

SEQ ID NO: 11540 - DNA, 23 bp, Artificial Sequence
  human ApoB siRNA sequence
catcgtgcaaacttgacttcaga

SEQ ID NO: 11541 - DNA, 23 bp, Artificial Sequence
  human ApoB siRNA sequence
atcgtgcaaacttgacttcagag

SEQ ID NO: 11542 - DNA, 23 bp, Artificial Sequence
  human ApoB siRNA sequence
tcgtgcaaacttgacttcagaga

SEQ ID NO: 11543 - DNA, 23 bp, Artificial Sequence
  human ApoB siRNA sequence
cgtgcaaacttgacttcagagaa

SEQ ID NO: 11544 - DNA, 23 bp, Artificial Sequence
  human ApoB siRNA sequence
gtgcaaacttgacttcagagaaa

SEQ ID NO: 11545 - DNA, 23 bp, Artificial Sequence
  human ApoB siRNA sequence
tgcaaacttgacttcagagaaat

SEQ ID NO: 11546 - DNA, 23 bp, Artificial Sequence
  human ApoB siRNA sequence
gcaaacttgacttcagagaaata

SEQ ID NO: 11547 - DNA, 23 bp, Artificial Sequence
  human ApoB siRNA sequence
caaacttgacttcagagaaatac

SEQ ID NO: 11548 - DNA, 23 bp, Artificial Sequence
  human ApoB siRNA sequence
aaacttgacttcagagaaataca

SEQ ID NO: 11549 - DNA, 23 bp, Artificial Sequence
  human ApoB siRNA sequence
aacttgacttcagagaaatacaa

SEQ ID NO: 11550 - DNA, 23 bp, Artificial Sequence
  human ApoB siRNA sequence
acttgacttcagagaaatacaaa

SEQ ID NO: 11551 - DNA, 23 bp, Artificial Sequence
  human ApoB siRNA sequence
cttgacttcagagaaatacaaat

SEQ ID NO: 11552 - DNA, 23 bp, Artificial Sequence
  human ApoB siRNA sequence
ttgacttcagagaaatacaaatc

SEQ ID NO: 11553 - DNA, 23 bp, Artificial Sequence
  human ApoB siRNA sequence
tgacttcagagaaatacaaatct

SEQ ID NO: 11554 - DNA, 23 bp, Artificial Sequence
  human ApoB siRNA sequence
gacttcagagaaatacaaatcta

SEQ ID NO: 11555 - DNA, 23 bp, Artificial Sequence
  human ApoB siRNA sequence
acttcagagaaatacaaatctat

SEQ ID NO: 11556 - DNA, 23 bp, Artificial Sequence
  human ApoB siRNA sequence
cttcagagaaatacaaatctata

SEQ ID NO: 11557 - DNA, 23 bp, Artificial Sequence
  human ApoB siRNA sequence
ttcagagaaatacaaatctataa

SEQ ID NO: 11558 - DNA, 23 bp, Artificial Sequence
  human ApoB siRNA sequence
tcagagaaatacaaatctataag

SEQ ID NO: 11559 - DNA, 23 bp, Artificial Sequence
  human ApoB siRNA sequence
cagagaaatacaaatctataaga

SEQ ID NO: 11560 - DNA, 23 bp, Artificial Sequence
  human ApoB siRNA sequence
agagaaatacaaatctataagaa

SEQ ID NO: 11561 - DNA, 23 bp, Artificial Sequence
  human ApoB siRNA sequence
gagaaatacaaatctataagaag

SEQ ID NO: 11562 - DNA, 23 bp, Artificial Sequence
  human ApoB siRNA sequence
agaaatacaaatctataagaagc

SEQ ID NO: 11563 - DNA, 23 bp, Artificial Sequence
  human ApoB siRNA sequence
gaaatacaaatctataagaagct

SEQ ID NO: 11564 - DNA, 23 bp, Artificial Sequence
  human ApoB siRNA sequence
aaatacaaatctataagaagctg

SEQ ID NO: 11565 - DNA, 23 bp, Artificial Sequence
  human ApoB siRNA sequence
aatacaaatctataagaagctga

SEQ ID NO: 11566 - DNA, 23 bp, Artificial Sequence
  human ApoB siRNA sequence
atacaaatctataagaagctgag

SEQ ID NO: 11567 - DNA, 23 bp, Artificial Sequence
  human ApoB siRNA sequence
tacaaatctataagaagctgaga

SEQ ID NO: 11568 - DNA, 23 bp, Artificial Sequence
  human ApoB siRNA sequence
acaaatctataagaagctgagaa

SEQ ID NO: 11569 - DNA, 23 bp, Artificial Sequence
  human ApoB siRNA sequence
caaatctataagaagctgagaac

SEQ ID NO: 11570 - DNA, 23 bp, Artificial Sequence
  human ApoB siRNA sequence
aaatctataagaagctgagaact

SEQ ID NO: 11571 - DNA, 23 bp, Artificial Sequence
  human ApoB siRNA sequence
aatctataagaagctgagaactt

SEQ ID NO: 11572 - DNA, 23 bp, Artificial Sequence
  human ApoB siRNA sequence
atctataagaagctgagaacttc

SEQ ID NO: 11573 - DNA, 23 bp, Artificial Sequence
  human ApoB siRNA sequence
tctataagaagctgagaacttca

SEQ ID NO: 11574 - DNA, 23 bp, Artificial Sequence
  human ApoB siRNA sequence
ctataagaagctgagaacttcat

SEQ ID NO: 11575 - DNA, 23 bp, Artificial Sequence
  human ApoB siRNA sequence
tataagaagctgagaacttcatc

SEQ ID NO: 11576 - DNA, 23 bp, Artificial Sequence
  human ApoB siRNA sequence
ataagaagctgagaacttcatca

SEQ ID NO: 11577 - DNA, 23 bp, Artificial Sequence
  human ApoB siRNA sequence
taagaagctgagaacttcatcat

SEQ ID NO: 11578 - DNA, 23 bp, Artificial Sequence
  human ApoB siRNA sequence
aagaagctgagaacttcatcatt

SEQ ID NO: 11579 - DNA, 23 bp, Artificial Sequence
  human ApoB siRNA sequence
agaagctgagaacttcatcattt

SEQ ID NO: 11580 - DNA, 23 bp, Artificial Sequence
  human ApoB siRNA sequence
gaagctgagaacttcatcatttg

SEQ ID NO: 11581 - DNA, 23 bp, Artificial Sequence
  human ApoB siRNA sequence
aagctgagaacttcatcatttgc

SEQ ID NO: 11582 - DNA, 23 bp, Artificial Sequence
  human ApoB siRNA sequence
agctgagaacttcatcatttgcc

SEQ ID NO: 11583 - DNA, 23 bp, Artificial Sequence
  human ApoB siRNA sequence
gctgagaacttcatcatttgccc

SEQ ID NO: 11584 - DNA, 23 bp, Artificial Sequence
  human ApoB siRNA sequence
ctgagaacttcatcatttgccct

SEQ ID NO: 11585 - DNA, 23 bp, Artificial Sequence
  human ApoB siRNA sequence
tgagaacttcatcatttgccctc

SEQ ID NO: 11586 - DNA, 23 bp, Artificial Sequence
  human ApoB siRNA sequence
gagaacttcatcatttgccctca

SEQ ID NO: 11587 - DNA, 23 bp, Artificial Sequence
  human ApoB siRNA sequence
agaacttcatcatttgccctcaa

SEQ ID NO: 11588 - DNA, 23 bp, Artificial Sequence
  human ApoB siRNA sequence
gaacttcatcatttgccctcaac

SEQ ID NO: 11589 - DNA, 23 bp, Artificial Sequence
  human ApoB siRNA sequence
aacttcatcatttgccctcaacc

SEQ ID NO: 11590 - DNA, 23 bp, Artificial Sequence
  human ApoB siRNA sequence
acttcatcatttgccctcaacct

SEQ ID NO: 11591 - DNA, 23 bp, Artificial Sequence
  human ApoB siRNA sequence
cttcatcatttgccctcaaccta

SEQ ID NO: 11592 - DNA, 23 bp, Artificial Sequence
  human ApoB siRNA sequence
ttcatcatttgccctcaacctac

SEQ ID NO: 11593 - DNA, 23 bp, Artificial Sequence
  human ApoB siRNA sequence
tcatcatttgccctcaacctacc

SEQ ID NO: 11594 - DNA, 23 bp, Artificial Sequence
  human ApoB siRNA sequence
catcatttgccctcaacctacca

SEQ ID NO: 11595 - DNA, 23 bp, Artificial Sequence
  human ApoB siRNA sequence
atcatttgccctcaacctaccaa

SEQ ID NO: 11596 - DNA, 23 bp, Artificial Sequence
  human ApoB siRNA sequence
tcatttgccctcaacctaccaac

SEQ ID NO: 11597 - DNA, 23 bp, Artificial Sequence
  human ApoB siRNA sequence
catttgccctcaacctaccaaca

SEQ ID NO: 11598 - DNA, 23 bp, Artificial Sequence
  human ApoB siRNA sequence
atttgccctcaacctaccaacac

SEQ ID NO: 11599 - DNA, 23 bp, Artificial Sequence
  human ApoB siRNA sequence
tttgccctcaacctaccaacact

SEQ ID NO: 11600 - DNA, 23 bp, Artificial Sequence
  human ApoB siRNA sequence
ttgccctcaacctaccaacactc

SEQ ID NO: 11601 - DNA, 23 bp, Artificial Sequence
  human ApoB siRNA sequence
tgccctcaacctaccaacactcc

SEQ ID NO: 11602 - DNA, 23 bp, Artificial Sequence
  human ApoB siRNA sequence
gccctcaacctaccaacactccc

SEQ ID NO: 11603 - DNA, 23 bp, Artificial Sequence
  human ApoB siRNA sequence
ccctcaacctaccaacactcccc

SEQ ID NO: 11604 - DNA, 23 bp, Artificial Sequence
  human ApoB siRNA sequence
cctcaacctaccaacactccccg

SEQ ID NO: 11605 - DNA, 23 bp, Artificial Sequence
  human ApoB siRNA sequence
ctcaacctaccaacactccccga

SEQ ID NO: 11606 - DNA, 23 bp, Artificial Sequence
  human ApoB siRNA sequence
tcaacctaccaacactccccgag

SEQ ID NO: 11607 - DNA, 23 bp, Artificial Sequence
  human ApoB siRNA sequence
caacctaccaacactccccgagg

SEQ ID NO: 11608 - DNA, 23 bp, Artificial Sequence
  human ApoB siRNA sequence
aacctaccaacactccccgaggt

SEQ ID NO: 11609 - DNA, 23 bp, Artificial Sequence
  human ApoB siRNA sequence
acctaccaacactccccgaggta

SEQ ID NO: 11610 - DNA, 23 bp, Artificial Sequence
  human ApoB siRNA sequence
cctaccaacactccccgaggtaa

SEQ ID NO: 11611 - DNA, 23 bp, Artificial Sequence
  human ApoB siRNA sequence
ctaccaacactccccgaggtaaa

SEQ ID NO: 11612 - DNA, 23 bp, Artificial Sequence
  human ApoB siRNA sequence
taccaacactccccgaggtaaaa

SEQ ID NO: 11613 - DNA, 23 bp, Artificial Sequence
  human ApoB siRNA sequence
accaacactccccgaggtaaaat

SEQ ID NO: 11614 - DNA, 23 bp, Artificial Sequence
  human ApoB siRNA sequence
ccaacactccccgaggtaaaatt

SEQ ID NO: 11615 - DNA, 23 bp, Artificial Sequence
  human ApoB siRNA sequence
caacactccccgaggtaaaattc

SEQ ID NO: 11616 - DNA, 23 bp, Artificial Sequence
  human ApoB siRNA sequence
aacactccccgaggtaaaattcc

SEQ ID NO: 11617 - DNA, 23 bp, Artificial Sequence
  human ApoB siRNA sequence
acactccccgaggtaaaattccc

SEQ ID NO: 11618 - DNA, 23 bp, Artificial Sequence
  human ApoB siRNA sequence
cactccccgaggtaaaattccct

SEQ ID NO: 11619 - DNA, 23 bp, Artificial Sequence
  human ApoB siRNA sequence
actccccgaggtaaaattccctg

SEQ ID NO: 11620 - DNA, 23 bp, Artificial Sequence
  human ApoB siRNA sequence
ctccccgaggtaaaattccctga

SEQ ID NO: 11621 - DNA, 23 bp, Artificial Sequence
  human ApoB siRNA sequence
tccccgaggtaaaattccctgaa

SEQ ID NO: 11622 - DNA, 23 bp, Artificial Sequence
  human ApoB siRNA sequence
ccccgaggtaaaattccctgaag

SEQ ID NO: 11623 - DNA, 23 bp, Artificial Sequence
  human ApoB siRNA sequence
cccgaggtaaaattccctgaagt

SEQ ID NO: 11624 - DNA, 23 bp, Artificial Sequence
  human ApoB siRNA sequence
ccgaggtaaaattccctgaagtt

SEQ ID NO: 11625 - DNA, 23 bp, Artificial Sequence
  human ApoB siRNA sequence
cgaggtaaaattccctgaagttg

SEQ ID NO: 11626 - DNA, 23 bp, Artificial Sequence
  human ApoB siRNA sequence
gaggtaaaattccctgaagttga

SEQ ID NO: 11627 - DNA, 23 bp, Artificial Sequence
  human ApoB siRNA sequence
aggtaaaattccctgaagttgat

SEQ ID NO: 11628 - DNA, 23 bp, Artificial Sequence
  human ApoB siRNA sequence
ggtaaaattccctgaagttgatg

SEQ ID NO: 11629 - DNA, 23 bp, Artificial Sequence
  human ApoB siRNA sequence
gtaaaattccctgaagttgatgt

SEQ ID NO: 11630 - DNA, 23 bp, Artificial Sequence
  human ApoB siRNA sequence
taaaattccctgaagttgatgtg

SEQ ID NO: 11631 - DNA, 23 bp, Artificial Sequence
  human ApoB siRNA sequence
aaaattccctgaagttgatgtgt

SEQ ID NO: 11632 - DNA, 23 bp, Artificial Sequence
  human ApoB siRNA sequence
aaattccctgaagttgatgtgtt

SEQ ID NO: 11633 - DNA, 23 bp, Artificial Sequence
  human ApoB siRNA sequence
aattccctgaagttgatgtgtta

SEQ ID NO: 11634 - DNA, 23 bp, Artificial Sequence
  human ApoB siRNA sequence
attccctgaagttgatgtgttaa

SEQ ID NO: 11635 - DNA, 23 bp, Artificial Sequence
  human ApoB siRNA sequence
ttccctgaagttgatgtgttaac

SEQ ID NO: 11636 - DNA, 23 bp, Artificial Sequence
  human ApoB siRNA sequence
tccctgaagttgatgtgttaaca

SEQ ID NO: 11637 - DNA, 23 bp, Artificial Sequence
  human ApoB siRNA sequence
ccctgaagttgatgtgttaacaa

SEQ ID NO: 11638 - DNA, 23 bp, Artificial Sequence
  human ApoB siRNA sequence
cctgaagttgatgtgttaacaaa

SEQ ID NO: 11639 - DNA, 23 bp, Artificial Sequence
  human ApoB siRNA sequence
ctgaagttgatgtgttaacaaaa

SEQ ID NO: 11640 - DNA, 23 bp, Artificial Sequence
  human ApoB siRNA sequence
tgaagttgatgtgttaacaaaat

SEQ ID NO: 11641 - DNA, 23 bp, Artificial Sequence
  human ApoB siRNA sequence
gaagttgatgtgttaacaaaata

SEQ ID NO: 11642 - DNA, 23 bp, Artificial Sequence
  human ApoB siRNA sequence
aagttgatgtgttaacaaaatat

SEQ ID NO: 11643 - DNA, 23 bp, Artificial Sequence
  human ApoB siRNA sequence
agttgatgtgttaacaaaatatt

SEQ ID NO: 11644 - DNA, 23 bp, Artificial Sequence
  human ApoB siRNA sequence
gttgatgtgttaacaaaatattc

SEQ ID NO: 11645 - DNA, 23 bp, Artificial Sequence
  human ApoB siRNA sequence
ttgatgtgttaacaaaatattct

SEQ ID NO: 11646 - DNA, 23 bp, Artificial Sequence
  human ApoB siRNA sequence
tgatgtgttaacaaaatattctc

SEQ ID NO: 11647 - DNA, 23 bp, Artificial Sequence
  human ApoB siRNA sequence
gatgtgttaacaaaatattctca

SEQ ID NO: 11648 - DNA, 23 bp, Artificial Sequence
  human ApoB siRNA sequence
atgtgttaacaaaatattctcaa

SEQ ID NO: 11649 - DNA, 23 bp, Artificial Sequence
  human ApoB siRNA sequence
tgtgttaacaaaatattctcaac

SEQ ID NO: 11650 - DNA, 23 bp, Artificial Sequence
  human ApoB siRNA sequence
gtgttaacaaaatattctcaacc

SEQ ID NO: 11651 - DNA, 23 bp, Artificial Sequence
  human ApoB siRNA sequence
tgttaacaaaatattctcaacca

SEQ ID NO: 11652 - DNA, 23 bp, Artificial Sequence
  human ApoB siRNA sequence
gttaacaaaatattctcaaccag

SEQ ID NO: 11653 - DNA, 23 bp, Artificial Sequence
  human ApoB siRNA sequence
ttaacaaaatattctcaaccaga

SEQ ID NO: 11654 - DNA, 23 bp, Artificial Sequence
  human ApoB siRNA sequence
taacaaaatattctcaaccagaa

SEQ ID NO: 11655 - DNA, 23 bp, Artificial Sequence
  human ApoB siRNA sequence
aacaaaatattctcaaccagaag

SEQ ID NO: 11656 - DNA, 23 bp, Artificial Sequence
  human ApoB siRNA sequence
acaaaatattctcaaccagaaga

SEQ ID NO: 11657 - DNA, 23 bp, Artificial Sequence
  human ApoB siRNA sequence
caaaatattctcaaccagaagac

SEQ ID NO: 11658 - DNA, 23 bp, Artificial Sequence
  human ApoB siRNA sequence
aaaatattctcaaccagaagact

SEQ ID NO: 11659 - DNA, 23 bp, Artificial Sequence
  human ApoB siRNA sequence
aaatattctcaaccagaagactc

SEQ ID NO: 11660 - DNA, 23 bp, Artificial Sequence
  human ApoB siRNA sequence
aatattctcaaccagaagactcc

SEQ ID NO: 11661 - DNA, 23 bp, Artificial Sequence
  human ApoB siRNA sequence
atattctcaaccagaagactcct

SEQ ID NO: 11662 - DNA, 23 bp, Artificial Sequence
  human ApoB siRNA sequence
tattctcaaccagaagactcctt

SEQ ID NO: 11663 - DNA, 23 bp, Artificial Sequence
  human ApoB siRNA sequence
attctcaaccagaagactccttg

SEQ ID NO: 11664 - DNA, 23 bp, Artificial Sequence
  human ApoB siRNA sequence
ttctcaaccagaagactccttga

SEQ ID NO: 11665 - DNA, 23 bp, Artificial Sequence
  human ApoB siRNA sequence
tctcaaccagaagactccttgat

SEQ ID NO: 11666 - DNA, 23 bp, Artificial Sequence
  human ApoB siRNA sequence
ctcaaccagaagactccttgatt

SEQ ID NO: 11667 - DNA, 23 bp, Artificial Sequence
  human ApoB siRNA sequence
tcaaccagaagactccttgattc

SEQ ID NO: 11668 - DNA, 23 bp, Artificial Sequence
  human ApoB siRNA sequence
caaccagaagactccttgattcc

SEQ ID NO: 11669 - DNA, 23 bp, Artificial Sequence
  human ApoB siRNA sequence
aaccagaagactccttgattccc

SEQ ID NO: 11670 - DNA, 23 bp, Artificial Sequence
  human ApoB siRNA sequence
accagaagactccttgattccct

SEQ ID NO: 11671 - DNA, 23 bp, Artificial Sequence
  human ApoB siRNA sequence
ccagaagactccttgattccctt

SEQ ID NO: 11672 - DNA, 23 bp, Artificial Sequence
  human ApoB siRNA sequence
cagaagactccttgattcccttt

SEQ ID NO: 11673 - DNA, 23 bp, Artificial Sequence
  human ApoB siRNA sequence
agaagactccttgattccctttt

SEQ ID NO: 11674 - DNA, 23 bp, Artificial Sequence
  human ApoB siRNA sequence
gaagactccttgattcccttttt

SEQ ID NO: 11675 - DNA, 23 bp, Artificial Sequence
  human ApoB siRNA sequence
aagactccttgattccctttttt

SEQ ID NO: 11676 - DNA, 23 bp, Artificial Sequence
  human ApoB siRNA sequence
agactccttgattcccttttttg

SEQ ID NO: 11677 - DNA, 23 bp, Artificial Sequence
  human ApoB siRNA sequence
gactccttgattcccttttttga

SEQ ID NO: 11678 - DNA, 23 bp, Artificial Sequence
  human ApoB siRNA sequence
actccttgattcccttttttgag

SEQ ID NO: 11679 - DNA, 23 bp, Artificial Sequence
  human ApoB siRNA sequence
ctccttgattcccttttttgaga

SEQ ID NO: 11680 - DNA, 23 bp, Artificial Sequence
  human ApoB siRNA sequence
tccttgattcccttttttgagat

SEQ ID NO: 11681 - DNA, 23 bp, Artificial Sequence
  human ApoB siRNA sequence
ccttgattcccttttttgagata

SEQ ID NO: 11682 - DNA, 23 bp, Artificial Sequence
  human ApoB siRNA sequence
cttgattcccttttttgagataa

SEQ ID NO: 11683 - DNA, 23 bp, Artificial Sequence
  human ApoB siRNA sequence
ttgattcccttttttgagataac

SEQ ID NO: 11684 - DNA, 23 bp, Artificial Sequence
  human ApoB siRNA sequence
tgattcccttttttgagataacc

SEQ ID NO: 11685 - DNA, 23 bp, Artificial Sequence
  human ApoB siRNA sequence
gattcccttttttgagataaccg

SEQ ID NO: 11686 - DNA, 23 bp, Artificial Sequence
  human ApoB siRNA sequence
attcccttttttgagataaccgt

SEQ ID NO: 11687 - DNA, 23 bp, Artificial Sequence
  human ApoB siRNA sequence
ttcccttttttgagataaccgtg

SEQ ID NO: 11688 - DNA, 23 bp, Artificial Sequence
  human ApoB siRNA sequence
tcccttttttgagataaccgtgc

SEQ ID NO: 11689 - DNA, 23 bp, Artificial Sequence
  human ApoB siRNA sequence
cccttttttgagataaccgtgcc

SEQ ID NO: 11690 - DNA, 23 bp, Artificial Sequence
  human ApoB siRNA sequence
ccttttttgagataaccgtgcct

SEQ ID NO: 11691 - DNA, 23 bp, Artificial Sequence
  human ApoB siRNA sequence
cttttttgagataaccgtgcctg

SEQ ID NO: 11692 - DNA, 23 bp, Artificial Sequence
  human ApoB siRNA sequence
ttttttgagataaccgtgcctga

SEQ ID NO: 11693 - DNA, 23 bp, Artificial Sequence
  human ApoB siRNA sequence
tttttgagataaccgtgcctgaa

SEQ ID NO: 11694 - DNA, 23 bp, Artificial Sequence
  human ApoB siRNA sequence
ttttgagataaccgtgcctgaat

SEQ ID NO: 11695 - DNA, 23 bp, Artificial Sequence
  human ApoB siRNA sequence
tttgagataaccgtgcctgaatc

SEQ ID NO: 11696 - DNA, 23 bp, Artificial Sequence
  human ApoB siRNA sequence
ttgagataaccgtgcctgaatct

SEQ ID NO: 11697 - DNA, 23 bp, Artificial Sequence
  human ApoB siRNA sequence
tgagataaccgtgcctgaatctc

SEQ ID NO: 11698 - DNA, 23 bp, Artificial Sequence
  human ApoB siRNA sequence
gagataaccgtgcctgaatctca

SEQ ID NO: 11699 - DNA, 23 bp, Artificial Sequence
  human ApoB siRNA sequence
agataaccgtgcctgaatctcag

SEQ ID NO: 11700 - DNA, 23 bp, Artificial Sequence
  human ApoB siRNA sequence
gataaccgtgcctgaatctcagt

SEQ ID NO: 11701 - DNA, 23 bp, Artificial Sequence
  human ApoB siRNA sequence
ataaccgtgcctgaatctcagtt

SEQ ID NO: 11702 - DNA, 23 bp, Artificial Sequence
  human ApoB siRNA sequence
taaccgtgcctgaatctcagtta

SEQ ID NO: 11703 - DNA, 23 bp, Artificial Sequence
  human ApoB siRNA sequence
aaccgtgcctgaatctcagttaa

SEQ ID NO: 11704 - DNA, 23 bp, Artificial Sequence
  human ApoB siRNA sequence
accgtgcctgaatctcagttaac

SEQ ID NO: 11705 - DNA, 23 bp, Artificial Sequence
  human ApoB siRNA sequence
ccgtgcctgaatctcagttaact

SEQ ID NO: 11706 - DNA, 23 bp, Artificial Sequence
  human ApoB siRNA sequence
cgtgcctgaatctcagttaactg

SEQ ID NO: 11707 - DNA, 23 bp, Artificial Sequence
  human ApoB siRNA sequence
gtgcctgaatctcagttaactgt

SEQ ID NO: 11708 - DNA, 23 bp, Artificial Sequence
  human ApoB siRNA sequence
tgcctgaatctcagttaactgtg

SEQ ID NO: 11709 - DNA, 23 bp, Artificial Sequence
  human ApoB siRNA sequence
gcctgaatctcagttaactgtgt

SEQ ID NO: 11710 - DNA, 23 bp, Artificial Sequence
  human ApoB siRNA sequence
cctgaatctcagttaactgtgtc

SEQ ID NO: 11711 - DNA, 23 bp, Artificial Sequence
  human ApoB siRNA sequence
ctgaatctcagttaactgtgtcc

SEQ ID NO: 11712 - DNA, 23 bp, Artificial Sequence
  human ApoB siRNA sequence
tgaatctcagttaactgtgtccc

SEQ ID NO: 11713 - DNA, 23 bp, Artificial Sequence
  human ApoB siRNA sequence
gaatctcagttaactgtgtccca

SEQ ID NO: 11714 - DNA, 23 bp, Artificial Sequence
  human ApoB siRNA sequence
aatctcagttaactgtgtcccag

SEQ ID NO: 11715 - DNA, 23 bp, Artificial Sequence
  human ApoB siRNA sequence
atctcagttaactgtgtcccagt

SEQ ID NO: 11716 - DNA, 23 bp, Artificial Sequence
  human ApoB siRNA sequence
tctcagttaactgtgtcccagtt

SEQ ID NO: 11717 - DNA, 23 bp, Artificial Sequence
  human ApoB siRNA sequence
ctcagttaactgtgtcccagttc

SEQ ID NO: 11718 - DNA, 23 bp, Artificial Sequence
  human ApoB siRNA sequence
tcagttaactgtgtcccagttca

SEQ ID NO: 11719 - DNA, 23 bp, Artificial Sequence
  human ApoB siRNA sequence
cagttaactgtgtcccagttcac

SEQ ID NO: 11720 - DNA, 23 bp, Artificial Sequence
  human ApoB siRNA sequence
agttaactgtgtcccagttcacg

SEQ ID NO: 11721 - DNA, 23 bp, Artificial Sequence
  human ApoB siRNA sequence
gttaactgtgtcccagttcacgc

SEQ ID NO: 11722 - DNA, 23 bp, Artificial Sequence
  human ApoB siRNA sequence
ttaactgtgtcccagttcacgct

SEQ ID NO: 11723 - DNA, 23 bp, Artificial Sequence
  human ApoB siRNA sequence
taactgtgtcccagttcacgctt

SEQ ID NO: 11724 - DNA, 23 bp, Artificial Sequence
  human ApoB siRNA sequence
aactgtgtcccagttcacgcttc

SEQ ID NO: 11725 - DNA, 23 bp, Artificial Sequence
  human ApoB siRNA sequence
actgtgtcccagttcacgcttcc

SEQ ID NO: 11726 - DNA, 23 bp, Artificial Sequence
  human ApoB siRNA sequence
ctgtgtcccagttcacgcttcca

SEQ ID NO: 11727 - DNA, 23 bp, Artificial Sequence
  human ApoB siRNA sequence
tgtgtcccagttcacgcttccaa

SEQ ID NO: 11728 - DNA, 23 bp, Artificial Sequence
  human ApoB siRNA sequence
gtgtcccagttcacgcttccaaa

SEQ ID NO: 11729 - DNA, 23 bp, Artificial Sequence
  human ApoB siRNA sequence
tgtcccagttcacgcttccaaaa

SEQ ID NO: 11730 - DNA, 23 bp, Artificial Sequence
  human ApoB siRNA sequence
gtcccagttcacgcttccaaaaa

SEQ ID NO: 11731 - DNA, 23 bp, Artificial Sequence
  human ApoB siRNA sequence
tcccagttcacgcttccaaaaag

SEQ ID NO: 11732 - DNA, 23 bp, Artificial Sequence
  human ApoB siRNA sequence
cccagttcacgcttccaaaaagt

SEQ ID NO: 11733 - DNA, 23 bp, Artificial Sequence
  human ApoB siRNA sequence
ccagttcacgcttccaaaaagtg

SEQ ID NO: 11734 - DNA, 23 bp, Artificial Sequence
  human ApoB siRNA sequence
cagttcacgcttccaaaaagtgt

SEQ ID NO: 11735 - DNA, 23 bp, Artificial Sequence
  human ApoB siRNA sequence
agttcacgcttccaaaaagtgtt

SEQ ID NO: 11736 - DNA, 23 bp, Artificial Sequence
  human ApoB siRNA sequence
gttcacgcttccaaaaagtgttt

SEQ ID NO: 11737 - DNA, 23 bp, Artificial Sequence
  human ApoB siRNA sequence
ttcacgcttccaaaaagtgtttc

SEQ ID NO: 11738 - DNA, 23 bp, Artificial Sequence
  human ApoB siRNA sequence
tcacgcttccaaaaagtgtttca

SEQ ID NO: 11739 - DNA, 23 bp, Artificial Sequence
  human ApoB siRNA sequence
cacgcttccaaaaagtgtttcag

SEQ ID NO: 11740 - DNA, 23 bp, Artificial Sequence
  human ApoB siRNA sequence
acgcttccaaaaagtgtttcaga

SEQ ID NO: 11741 - DNA, 23 bp, Artificial Sequence
  human ApoB siRNA sequence
cgcttccaaaaagtgtttcagat

SEQ ID NO: 11742 - DNA, 23 bp, Artificial Sequence
  human ApoB siRNA sequence
gcttccaaaaagtgtttcagatg

SEQ ID NO: 11743 - DNA, 23 bp, Artificial Sequence
  human ApoB siRNA sequence
cttccaaaaagtgtttcagatgg

SEQ ID NO: 11744 - DNA, 23 bp, Artificial Sequence
  human ApoB siRNA sequence
ttccaaaaagtgtttcagatggc

SEQ ID NO: 11745 - DNA, 23 bp, Artificial Sequence
  human ApoB siRNA sequence
tccaaaaagtgtttcagatggca

SEQ ID NO: 11746 - DNA, 23 bp, Artificial Sequence
  human ApoB siRNA sequence
ccaaaaagtgtttcagatggcat

SEQ ID NO: 11747 - DNA, 23 bp, Artificial Sequence
  human ApoB siRNA sequence
caaaaagtgtttcagatggcatt

SEQ ID NO: 11748 - DNA, 23 bp, Artificial Sequence
  human ApoB siRNA sequence
aaaaagtgtttcagatggcattg

SEQ ID NO: 11749 - DNA, 23 bp, Artificial Sequence
  human ApoB siRNA sequence
aaaagtgtttcagatggcattgc

SEQ ID NO: 11750 - DNA, 23 bp, Artificial Sequence
  human ApoB siRNA sequence
aaagtgtttcagatggcattgct

SEQ ID NO: 11751 - DNA, 23 bp, Artificial Sequence
  human ApoB siRNA sequence
aagtgtttcagatggcattgctg

SEQ ID NO: 11752 - DNA, 23 bp, Artificial Sequence
  human ApoB siRNA sequence
agtgtttcagatggcattgctgc

SEQ ID NO: 11753 - DNA, 23 bp, Artificial Sequence
  human ApoB siRNA sequence
gtgtttcagatggcattgctgct

SEQ ID NO: 11754 - DNA, 23 bp, Artificial Sequence
  human ApoB siRNA sequence
tgtttcagatggcattgctgctt

SEQ ID NO: 11755 - DNA, 23 bp, Artificial Sequence
  human ApoB siRNA sequence
gtttcagatggcattgctgcttt

SEQ ID NO: 11756 - DNA, 23 bp, Artificial Sequence
  human ApoB siRNA sequence
tttcagatggcattgctgctttg

SEQ ID NO: 11757 - DNA, 23 bp, Artificial Sequence
  human ApoB siRNA sequence
ttcagatggcattgctgctttgg

SEQ ID NO: 11758 - DNA, 23 bp, Artificial Sequence
  human ApoB siRNA sequence
tcagatggcattgctgctttgga

SEQ ID NO: 11759 - DNA, 23 bp, Artificial Sequence
  human ApoB siRNA sequence
cagatggcattgctgctttggat

SEQ ID NO: 11760 - DNA, 23 bp, Artificial Sequence
  human ApoB siRNA sequence
agatggcattgctgctttggatc

SEQ ID NO: 11761 - DNA, 23 bp, Artificial Sequence
  human ApoB siRNA sequence
gatggcattgctgctttggatct

SEQ ID NO: 11762 - DNA, 23 bp, Artificial Sequence
  human ApoB siRNA sequence
atggcattgctgctttggatcta

SEQ ID NO: 11763 - DNA, 23 bp, Artificial Sequence
  human ApoB siRNA sequence
tggcattgctgctttggatctaa

SEQ ID NO: 11764 - DNA, 23 bp, Artificial Sequence
  human ApoB siRNA sequence
ggcattgctgctttggatctaaa

SEQ ID NO: 11765 - DNA, 23 bp, Artificial Sequence
  human ApoB siRNA sequence
gcattgctgctttggatctaaat

SEQ ID NO: 11766 - DNA, 23 bp, Artificial Sequence
  human ApoB siRNA sequence
cattgctgctttggatctaaatg

SEQ ID NO: 11767 - DNA, 23 bp, Artificial Sequence
  human ApoB siRNA sequence
attgctgctttggatctaaatgc

SEQ ID NO: 11768 - DNA, 23 bp, Artificial Sequence
  human ApoB siRNA sequence
ttgctgctttggatctaaatgca

SEQ ID NO: 11769 - DNA, 23 bp, Artificial Sequence
  human ApoB siRNA sequence
tgctgctttggatctaaatgcag

SEQ ID NO: 11770 - DNA, 23 bp, Artificial Sequence
  human ApoB siRNA sequence
gctgctttggatctaaatgcagt

SEQ ID NO: 11771 - DNA, 23 bp, Artificial Sequence
  human ApoB siRNA sequence
ctgctttggatctaaatgcagta

SEQ ID NO: 11772 - DNA, 23 bp, Artificial Sequence
  human ApoB siRNA sequence
tgctttggatctaaatgcagtag

SEQ ID NO: 11773 - DNA, 23 bp, Artificial Sequence
  human ApoB siRNA sequence
gctttggatctaaatgcagtagc

SEQ ID NO: 11774 - DNA, 23 bp, Artificial Sequence
  human ApoB siRNA sequence
ctttggatctaaatgcagtagcc

SEQ ID NO: 11775 - DNA, 23 bp, Artificial Sequence
  human ApoB siRNA sequence
tttggatctaaatgcagtagcca

SEQ ID NO: 11776 - DNA, 23 bp, Artificial Sequence
  human ApoB siRNA sequence
ttggatctaaatgcagtagccaa

SEQ ID NO: 11777 - DNA, 23 bp, Artificial Sequence
  human ApoB siRNA sequence
tggatctaaatgcagtagccaac

SEQ ID NO: 11778 - DNA, 23 bp, Artificial Sequence
  human ApoB siRNA sequence
ggatctaaatgcagtagccaaca

SEQ ID NO: 11779 - DNA, 23 bp, Artificial Sequence
  human ApoB siRNA sequence
gatctaaatgcagtagccaacaa

SEQ ID NO: 11780 - DNA, 23 bp, Artificial Sequence
  human ApoB siRNA sequence
atctaaatgcagtagccaacaag

SEQ ID NO: 11781 - DNA, 23 bp, Artificial Sequence
  human ApoB siRNA sequence
tctaaatgcagtagccaacaaga

SEQ ID NO: 11782 - DNA, 23 bp, Artificial Sequence
  human ApoB siRNA sequence
ctaaatgcagtagccaacaagat

SEQ ID NO: 11783 - DNA, 23 bp, Artificial Sequence
  human ApoB siRNA sequence
taaatgcagtagccaacaagatc

SEQ ID NO: 11784 - DNA, 23 bp, Artificial Sequence
  human ApoB siRNA sequence
aaatgcagtagccaacaagatcg

SEQ ID NO: 11785 - DNA, 23 bp, Artificial Sequence
  human ApoB siRNA sequence
aatgcagtagccaacaagatcgc

SEQ ID NO: 11786 - DNA, 23 bp, Artificial Sequence
  human ApoB siRNA sequence
atgcagtagccaacaagatcgca

SEQ ID NO: 11787 - DNA, 23 bp, Artificial Sequence
  human ApoB siRNA sequence
tgcagtagccaacaagatcgcag

SEQ ID NO: 11788 - DNA, 23 bp, Artificial Sequence
  human ApoB siRNA sequence
gcagtagccaacaagatcgcaga

SEQ ID NO: 11789 - DNA, 23 bp, Artificial Sequence
  human ApoB siRNA sequence
cagtagccaacaagatcgcagac

SEQ ID NO: 11790 - DNA, 23 bp, Artificial Sequence
  human ApoB siRNA sequence
agtagccaacaagatcgcagact

SEQ ID NO: 11791 - DNA, 23 bp, Artificial Sequence
  human ApoB siRNA sequence
gtagccaacaagatcgcagactt

SEQ ID NO: 11792 - DNA, 23 bp, Artificial Sequence
  human ApoB siRNA sequence
tagccaacaagatcgcagacttt

SEQ ID NO: 11793 - DNA, 23 bp, Artificial Sequence
  human ApoB siRNA sequence
agccaacaagatcgcagactttg

SEQ ID NO: 11794 - DNA, 23 bp, Artificial Sequence
  human ApoB siRNA sequence
gccaacaagatcgcagactttga

SEQ ID NO: 11795 - DNA, 23 bp, Artificial Sequence
  human ApoB siRNA sequence
ccaacaagatcgcagactttgag

SEQ ID NO: 11796 - DNA, 23 bp, Artificial Sequence
  human ApoB siRNA sequence
caacaagatcgcagactttgagt

SEQ ID NO: 11797 - DNA, 23 bp, Artificial Sequence
  human ApoB siRNA sequence
aacaagatcgcagactttgagtt

SEQ ID NO: 11798 - DNA, 23 bp, Artificial Sequence
  human ApoB siRNA sequence
acaagatcgcagactttgagttg

SEQ ID NO: 11799 - DNA, 23 bp, Artificial Sequence
  human ApoB siRNA sequence
caagatcgcagactttgagttgc

SEQ ID NO: 11800 - DNA, 23 bp, Artificial Sequence
  human ApoB siRNA sequence
aagatcgcagactttgagttgcc

SEQ ID NO: 11801 - DNA, 23 bp, Artificial Sequence
  human ApoB siRNA sequence
agatcgcagactttgagttgccc

SEQ ID NO: 11802 - DNA, 23 bp, Artificial Sequence
  human ApoB siRNA sequence
gatcgcagactttgagttgccca

SEQ ID NO: 11803 - DNA, 23 bp, Artificial Sequence
  human ApoB siRNA sequence
atcgcagactttgagttgcccac

SEQ ID NO: 11804 - DNA, 23 bp, Artificial Sequence
  human ApoB siRNA sequence
tcgcagactttgagttgcccacc

SEQ ID NO: 11805 - DNA, 23 bp, Artificial Sequence
  human ApoB siRNA sequence
cgcagactttgagttgcccacca

SEQ ID NO: 11806 - DNA, 23 bp, Artificial Sequence
  human ApoB siRNA sequence
gcagactttgagttgcccaccat

SEQ ID NO: 11807 - DNA, 23 bp, Artificial Sequence
  human ApoB siRNA sequence
cagactttgagttgcccaccatc

SEQ ID NO: 11808 - DNA, 23 bp, Artificial Sequence
  human ApoB siRNA sequence
agactttgagttgcccaccatca

SEQ ID NO: 11809 - DNA, 23 bp, Artificial Sequence
  human ApoB siRNA sequence
gactttgagttgcccaccatcat

SEQ ID NO: 11810 - DNA, 23 bp, Artificial Sequence
  human ApoB siRNA sequence
actttgagttgcccaccatcatc

SEQ ID NO: 11811 - DNA, 23 bp, Artificial Sequence
  human ApoB siRNA sequence
ctttgagttgcccaccatcatcg

SEQ ID NO: 11812 - DNA, 23 bp, Artificial Sequence
  human ApoB siRNA sequence
tttgagttgcccaccatcatcgt

SEQ ID NO: 11813 - DNA, 23 bp, Artificial Sequence
  human ApoB siRNA sequence
ttgagttgcccaccatcatcgtg

SEQ ID NO: 11814 - DNA, 23 bp, Artificial Sequence
  human ApoB siRNA sequence
tgagttgcccaccatcatcgtgc

SEQ ID NO: 11815 - DNA, 23 bp, Artificial Sequence
  human ApoB siRNA sequence
gagttgcccaccatcatcgtgcc

SEQ ID NO: 11816 - DNA, 23 bp, Artificial Sequence
  human ApoB siRNA sequence
agttgcccaccatcatcgtgcct

SEQ ID NO: 11817 - DNA, 23 bp, Artificial Sequence
  human ApoB siRNA sequence
gttgcccaccatcatcgtgcctg

SEQ ID NO: 11818 - DNA, 23 bp, Artificial Sequence
  human ApoB siRNA sequence
ttgcccaccatcatcgtgcctga

SEQ ID NO: 11819 - DNA, 23 bp, Artificial Sequence
  human ApoB siRNA sequence
tgcccaccatcatcgtgcctgag

SEQ ID NO: 11820 - DNA, 23 bp, Artificial Sequence
  human ApoB siRNA sequence
gcccaccatcatcgtgcctgagc

SEQ ID NO: 11821 - DNA, 23 bp, Artificial Sequence
  human ApoB siRNA sequence
cccaccatcatcgtgcctgagca

SEQ ID NO: 11822 - DNA, 23 bp, Artificial Sequence
  human ApoB siRNA sequence
ccaccatcatcgtgcctgagcag

SEQ ID NO: 11823 - DNA, 23 bp, Artificial Sequence
  human ApoB siRNA sequence
caccatcatcgtgcctgagcaga

SEQ ID NO: 11824 - DNA, 23 bp, Artificial Sequence
  human ApoB siRNA sequence
accatcatcgtgcctgagcagac

SEQ ID NO: 11825 - DNA, 23 bp, Artificial Sequence
  human ApoB siRNA sequence
ccatcatcgtgcctgagcagacc

SEQ ID NO: 11826 - DNA, 23 bp, Artificial Sequence
  human ApoB siRNA sequence
catcatcgtgcctgagcagacca

SEQ ID NO: 11827 - DNA, 23 bp, Artificial Sequence
  human ApoB siRNA sequence
atcatcgtgcctgagcagaccat

SEQ ID NO: 11828 - DNA, 23 bp, Artificial Sequence
  human ApoB siRNA sequence
tcatcgtgcctgagcagaccatt

SEQ ID NO: 11829 - DNA, 23 bp, Artificial Sequence
  human ApoB siRNA sequence
catcgtgcctgagcagaccattg

SEQ ID NO: 11830 - DNA, 23 bp, Artificial Sequence
  human ApoB siRNA sequence
atcgtgcctgagcagaccattga

SEQ ID NO: 11831 - DNA, 23 bp, Artificial Sequence
  human ApoB siRNA sequence
tcgtgcctgagcagaccattgag

SEQ ID NO: 11832 - DNA, 23 bp, Artificial Sequence
  human ApoB siRNA sequence
cgtgcctgagcagaccattgaga

SEQ ID NO: 11833 - DNA, 23 bp, Artificial Sequence
  human ApoB siRNA sequence
gtgcctgagcagaccattgagat

SEQ ID NO: 11834 - DNA, 23 bp, Artificial Sequence
  human ApoB siRNA sequence
tgcctgagcagaccattgagatt

SEQ ID NO: 11835 - DNA, 23 bp, Artificial Sequence
  human ApoB siRNA sequence
gcctgagcagaccattgagattc

SEQ ID NO: 11836 - DNA, 23 bp, Artificial Sequence
  human ApoB siRNA sequence
cctgagcagaccattgagattcc

SEQ ID NO: 11837 - DNA, 23 bp, Artificial Sequence
  human ApoB siRNA sequence
ctgagcagaccattgagattccc

SEQ ID NO: 11838 - DNA, 23 bp, Artificial Sequence
  human ApoB siRNA sequence
tgagcagaccattgagattccct

SEQ ID NO: 11839 - DNA, 23 bp, Artificial Sequence
  human ApoB siRNA sequence
gagcagaccattgagattccctc

SEQ ID NO: 11840 - DNA, 23 bp, Artificial Sequence
  human ApoB siRNA sequence
agcagaccattgagattccctcc

SEQ ID NO: 11841 - DNA, 23 bp, Artificial Sequence
  human ApoB siRNA sequence
gcagaccattgagattccctcca

SEQ ID NO: 11842 - DNA, 23 bp, Artificial Sequence
  human ApoB siRNA sequence
cagaccattgagattccctccat

SEQ ID NO: 11843 - DNA, 23 bp, Artificial Sequence
  human ApoB siRNA sequence
agaccattgagattccctccatt

SEQ ID NO: 11844 - DNA, 23 bp, Artificial Sequence
  human ApoB siRNA sequence
gaccattgagattccctccatta

SEQ ID NO: 11845 - DNA, 23 bp, Artificial Sequence
  human ApoB siRNA sequence
accattgagattccctccattaa

SEQ ID NO: 11846 - DNA, 23 bp, Artificial Sequence
  human ApoB siRNA sequence
ccattgagattccctccattaag

SEQ ID NO: 11847 - DNA, 23 bp, Artificial Sequence
  human ApoB siRNA sequence
cattgagattccctccattaagt

SEQ ID NO: 11848 - DNA, 23 bp, Artificial Sequence
  human ApoB siRNA sequence
attgagattccctccattaagtt

SEQ ID NO: 11849 - DNA, 23 bp, Artificial Sequence
  human ApoB siRNA sequence
ttgagattccctccattaagttc

SEQ ID NO: 11850 - DNA, 23 bp, Artificial Sequence
  human ApoB siRNA sequence
tgagattccctccattaagttct

SEQ ID NO: 11851 - DNA, 23 bp, Artificial Sequence
  human ApoB siRNA sequence
gagattccctccattaagttctc

SEQ ID NO: 11852 - DNA, 23 bp, Artificial Sequence
  human ApoB siRNA sequence
agattccctccattaagttctct

SEQ ID NO: 11853 - DNA, 23 bp, Artificial Sequence
  human ApoB siRNA sequence
gattccctccattaagttctctg

SEQ ID NO: 11854 - DNA, 23 bp, Artificial Sequence
  human ApoB siRNA sequence
attccctccattaagttctctgt

SEQ ID NO: 11855 - DNA, 23 bp, Artificial Sequence
  human ApoB siRNA sequence
ttccctccattaagttctctgta

SEQ ID NO: 11856 - DNA, 23 bp, Artificial Sequence
  human ApoB siRNA sequence
tccctccattaagttctctgtac

SEQ ID NO: 11857 - DNA, 23 bp, Artificial Sequence
  human ApoB siRNA sequence
ccctccattaagttctctgtacc

SEQ ID NO: 11858 - DNA, 23 bp, Artificial Sequence
  human ApoB siRNA sequence
cctccattaagttctctgtacct

SEQ ID NO: 11859 - DNA, 23 bp, Artificial Sequence
  human ApoB siRNA sequence
ctccattaagttctctgtacctg

SEQ ID NO: 11860 - DNA, 23 bp, Artificial Sequence
  human ApoB siRNA sequence
tccattaagttctctgtacctgc

SEQ ID NO: 11861 - DNA, 23 bp, Artificial Sequence
  human ApoB siRNA sequence
ccattaagttctctgtacctgct

SEQ ID NO: 11862 - DNA, 23 bp, Artificial Sequence
  human ApoB siRNA sequence
cattaagttctctgtacctgctg

SEQ ID NO: 11863 - DNA, 23 bp, Artificial Sequence
  human ApoB siRNA sequence
attaagttctctgtacctgctgg

SEQ ID NO: 11864 - DNA, 23 bp, Artificial Sequence
  human ApoB siRNA sequence
ttaagttctctgtacctgctgga

SEQ ID NO: 11865 - DNA, 23 bp, Artificial Sequence
  human ApoB siRNA sequence
taagttctctgtacctgctggaa

SEQ ID NO: 11866 - DNA, 23 bp, Artificial Sequence
  human ApoB siRNA sequence
aagttctctgtacctgctggaat

SEQ ID NO: 11867 - DNA, 23 bp, Artificial Sequence
  human ApoB siRNA sequence
agttctctgtacctgctggaatt

SEQ ID NO: 11868 - DNA, 23 bp, Artificial Sequence
  human ApoB siRNA sequence
gttctctgtacctgctggaattg

SEQ ID NO: 11869 - DNA, 23 bp, Artificial Sequence
  human ApoB siRNA sequence
ttctctgtacctgctggaattgt

SEQ ID NO: 11870 - DNA, 23 bp, Artificial Sequence
  human ApoB siRNA sequence
tctctgtacctgctggaattgtc

SEQ ID NO: 11871 - DNA, 23 bp, Artificial Sequence
  human ApoB siRNA sequence
ctctgtacctgctggaattgtca

SEQ ID NO: 11872 - DNA, 23 bp, Artificial Sequence
  human ApoB siRNA sequence
tctgtacctgctggaattgtcat

SEQ ID NO: 11873 - DNA, 23 bp, Artificial Sequence
  human ApoB siRNA sequence
ctgtacctgctggaattgtcatt

SEQ ID NO: 11874 - DNA, 23 bp, Artificial Sequence
  human ApoB siRNA sequence
tgtacctgctggaattgtcattc

SEQ ID NO: 11875 - DNA, 23 bp, Artificial Sequence
  human ApoB siRNA sequence
gtacctgctggaattgtcattcc

SEQ ID NO: 11876 - DNA, 23 bp, Artificial Sequence
  human ApoB siRNA sequence
tacctgctggaattgtcattcct

SEQ ID NO: 11877 - DNA, 23 bp, Artificial Sequence
  human ApoB siRNA sequence
acctgctggaattgtcattcctt

SEQ ID NO: 11878 - DNA, 23 bp, Artificial Sequence
  human ApoB siRNA sequence
cctgctggaattgtcattccttc

SEQ ID NO: 11879 - DNA, 23 bp, Artificial Sequence
  human ApoB siRNA sequence
ctgctggaattgtcattccttcc

SEQ ID NO: 11880 - DNA, 23 bp, Artificial Sequence
  human ApoB siRNA sequence
tgctggaattgtcattccttcct

SEQ ID NO: 11881 - DNA, 23 bp, Artificial Sequence
  human ApoB siRNA sequence
gctggaattgtcattccttcctt

SEQ ID NO: 11882 - DNA, 23 bp, Artificial Sequence
  human ApoB siRNA sequence
ctggaattgtcattccttccttt

SEQ ID NO: 11883 - DNA, 23 bp, Artificial Sequence
  human ApoB siRNA sequence
tggaattgtcattccttcctttc

SEQ ID NO: 11884 - DNA, 23 bp, Artificial Sequence
  human ApoB siRNA sequence
ggaattgtcattccttcctttca

SEQ ID NO: 11885 - DNA, 23 bp, Artificial Sequence
  human ApoB siRNA sequence
gaattgtcattccttcctttcaa

SEQ ID NO: 11886 - DNA, 23 bp, Artificial Sequence
  human ApoB siRNA sequence
aattgtcattccttcctttcaag

SEQ ID NO: 11887 - DNA, 23 bp, Artificial Sequence
  human ApoB siRNA sequence
attgtcattccttcctttcaagc

SEQ ID NO: 11888 - DNA, 23 bp, Artificial Sequence
  human ApoB siRNA sequence
ttgtcattccttcctttcaagca

SEQ ID NO: 11889 - DNA, 23 bp, Artificial Sequence
  human ApoB siRNA sequence
tgtcattccttcctttcaagcac

SEQ ID NO: 11890 - DNA, 23 bp, Artificial Sequence
  human ApoB siRNA sequence
gtcattccttcctttcaagcact

SEQ ID NO: 11891 - DNA, 23 bp, Artificial Sequence
  human ApoB siRNA sequence
tcattccttcctttcaagcactg

SEQ ID NO: 11892 - DNA, 23 bp, Artificial Sequence
  human ApoB siRNA sequence
cattccttcctttcaagcactga

SEQ ID NO: 11893 - DNA, 23 bp, Artificial Sequence
  human ApoB siRNA sequence
attccttcctttcaagcactgac

SEQ ID NO: 11894 - DNA, 23 bp, Artificial Sequence
  human ApoB siRNA sequence
ttccttcctttcaagcactgact

SEQ ID NO: 11895 - DNA, 23 bp, Artificial Sequence
  human ApoB siRNA sequence
tccttcctttcaagcactgactg

SEQ ID NO: 11896 - DNA, 23 bp, Artificial Sequence
  human ApoB siRNA sequence
ccttcctttcaagcactgactgc

SEQ ID NO: 11897 - DNA, 23 bp, Artificial Sequence
  human ApoB siRNA sequence
cttcctttcaagcactgactgca

SEQ ID NO: 11898 - DNA, 23 bp, Artificial Sequence
  human ApoB siRNA sequence
ttcctttcaagcactgactgcac

SEQ ID NO: 11899 - DNA, 23 bp, Artificial Sequence
  human ApoB siRNA sequence
tcctttcaagcactgactgcacg

SEQ ID NO: 11900 - DNA, 23 bp, Artificial Sequence
  human ApoB siRNA sequence
cctttcaagcactgactgcacgc

SEQ ID NO: 11901 - DNA, 23 bp, Artificial Sequence
  human ApoB siRNA sequence
ctttcaagcactgactgcacgct

SEQ ID NO: 11902 - DNA, 23 bp, Artificial Sequence
  human ApoB siRNA sequence
tttcaagcactgactgcacgctt

SEQ ID NO: 11903 - DNA, 23 bp, Artificial Sequence
  human ApoB siRNA sequence
ttcaagcactgactgcacgcttt

SEQ ID NO: 11904 - DNA, 23 bp, Artificial Sequence
  human ApoB siRNA sequence
tcaagcactgactgcacgctttg

SEQ ID NO: 11905 - DNA, 23 bp, Artificial Sequence
  human ApoB siRNA sequence
caagcactgactgcacgctttga

SEQ ID NO: 11906 - DNA, 23 bp, Artificial Sequence
  human ApoB siRNA sequence
aagcactgactgcacgctttgag

SEQ ID NO: 11907 - DNA, 23 bp, Artificial Sequence
  human ApoB siRNA sequence
agcactgactgcacgctttgagg

SEQ ID NO: 11908 - DNA, 23 bp, Artificial Sequence
  human ApoB siRNA sequence
gcactgactgcacgctttgaggt

SEQ ID NO: 11909 - DNA, 23 bp, Artificial Sequence
  human ApoB siRNA sequence
cactgactgcacgctttgaggta

SEQ ID NO: 11910 - DNA, 23 bp, Artificial Sequence
  human ApoB siRNA sequence
actgactgcacgctttgaggtag

SEQ ID NO: 11911 - DNA, 23 bp, Artificial Sequence
  human ApoB siRNA sequence
ctgactgcacgctttgaggtaga

SEQ ID NO: 11912 - DNA, 23 bp, Artificial Sequence
  human ApoB siRNA sequence
tgactgcacgctttgaggtagac

SEQ ID NO: 11913 - DNA, 23 bp, Artificial Sequence
  human ApoB siRNA sequence
gactgcacgctttgaggtagact

SEQ ID NO: 11914 - DNA, 23 bp, Artificial Sequence
  human ApoB siRNA sequence
actgcacgctttgaggtagactc

SEQ ID NO: 11915 - DNA, 23 bp, Artificial Sequence
  human ApoB siRNA sequence
ctgcacgctttgaggtagactct

SEQ ID NO: 11916 - DNA, 23 bp, Artificial Sequence
  human ApoB siRNA sequence
tgcacgctttgaggtagactctc

SEQ ID NO: 11917 - DNA, 23 bp, Artificial Sequence
  human ApoB siRNA sequence
gcacgctttgaggtagactctcc

SEQ ID NO: 11918 - DNA, 23 bp, Artificial Sequence
  human ApoB siRNA sequence
cacgctttgaggtagactctccc

SEQ ID NO: 11919 - DNA, 23 bp, Artificial Sequence
  human ApoB siRNA sequence
acgctttgaggtagactctcccg

SEQ ID NO: 11920 - DNA, 23 bp, Artificial Sequence
  human ApoB siRNA sequence
cgctttgaggtagactctcccgt

SEQ ID NO: 11921 - DNA, 23 bp, Artificial Sequence
  human ApoB siRNA sequence
gctttgaggtagactctcccgtg

SEQ ID NO: 11922 - DNA, 23 bp, Artificial Sequence
  human ApoB siRNA sequence
ctttgaggtagactctcccgtgt

SEQ ID NO: 11923 - DNA, 23 bp, Artificial Sequence
  human ApoB siRNA sequence
tttgaggtagactctcccgtgta

SEQ ID NO: 11924 - DNA, 23 bp, Artificial Sequence
  human ApoB siRNA sequence
ttgaggtagactctcccgtgtat

SEQ ID NO: 11925 - DNA, 23 bp, Artificial Sequence
  human ApoB siRNA sequence
tgaggtagactctcccgtgtata

SEQ ID NO: 11926 - DNA, 23 bp, Artificial Sequence
  human ApoB siRNA sequence
gaggtagactctcccgtgtataa

SEQ ID NO: 11927 - DNA, 23 bp, Artificial Sequence
  human ApoB siRNA sequence
aggtagactctcccgtgtataat

SEQ ID NO: 11928 - DNA, 23 bp, Artificial Sequence
  human ApoB siRNA sequence
ggtagactctcccgtgtataatg

SEQ ID NO: 11929 - DNA, 23 bp, Artificial Sequence
  human ApoB siRNA sequence
gtagactctcccgtgtataatgc

SEQ ID NO: 11930 - DNA, 23 bp, Artificial Sequence
  human ApoB siRNA sequence
tagactctcccgtgtataatgcc

SEQ ID NO: 11931 - DNA, 23 bp, Artificial Sequence
  human ApoB siRNA sequence
agactctcccgtgtataatgcca

SEQ ID NO: 11932 - DNA, 23 bp, Artificial Sequence
  human ApoB siRNA sequence
gactctcccgtgtataatgccac

SEQ ID NO: 11933 - DNA, 23 bp, Artificial Sequence
  human ApoB siRNA sequence
actctcccgtgtataatgccact

SEQ ID NO: 11934 - DNA, 23 bp, Artificial Sequence
  human ApoB siRNA sequence
ctctcccgtgtataatgccactt

SEQ ID NO: 11935 - DNA, 23 bp, Artificial Sequence
  human ApoB siRNA sequence
tctcccgtgtataatgccacttg

SEQ ID NO: 11936 - DNA, 23 bp, Artificial Sequence
  human ApoB siRNA sequence
ctcccgtgtataatgccacttgg

SEQ ID NO: 11937 - DNA, 23 bp, Artificial Sequence
  human ApoB siRNA sequence
tcccgtgtataatgccacttgga

SEQ ID NO: 11938 - DNA, 23 bp, Artificial Sequence
  human ApoB siRNA sequence
cccgtgtataatgccacttggag

SEQ ID NO: 11939 - DNA, 23 bp, Artificial Sequence
  human ApoB siRNA sequence
ccgtgtataatgccacttggagt

SEQ ID NO: 11940 - DNA, 23 bp, Artificial Sequence
  human ApoB siRNA sequence
cgtgtataatgccacttggagtg

SEQ ID NO: 11941 - DNA, 23 bp, Artificial Sequence
  human ApoB siRNA sequence
gtgtataatgccacttggagtgc

SEQ ID NO: 11942 - DNA, 23 bp, Artificial Sequence
  human ApoB siRNA sequence
tgtataatgccacttggagtgcc

SEQ ID NO: 11943 - DNA, 23 bp, Artificial Sequence
  human ApoB siRNA sequence
gtataatgccacttggagtgcca

SEQ ID NO: 11944 - DNA, 23 bp, Artificial Sequence
  human ApoB siRNA sequence
tataatgccacttggagtgccag

SEQ ID NO: 11945 - DNA, 23 bp, Artificial Sequence
  human ApoB siRNA sequence
ataatgccacttggagtgccagt

SEQ ID NO: 11946 - DNA, 23 bp, Artificial Sequence
  human ApoB siRNA sequence
taatgccacttggagtgccagtt

SEQ ID NO: 11947 - DNA, 23 bp, Artificial Sequence
  human ApoB siRNA sequence
aatgccacttggagtgccagttt

SEQ ID NO: 11948 - DNA, 23 bp, Artificial Sequence
  human ApoB siRNA sequence
atgccacttggagtgccagtttg

SEQ ID NO: 11949 - DNA, 23 bp, Artificial Sequence
  human ApoB siRNA sequence
tgccacttggagtgccagtttga

SEQ ID NO: 11950 - DNA, 23 bp, Artificial Sequence
  human ApoB siRNA sequence
gccacttggagtgccagtttgaa

SEQ ID NO: 11951 - DNA, 23 bp, Artificial Sequence
  human ApoB siRNA sequence
ccacttggagtgccagtttgaaa

SEQ ID NO: 11952 - DNA, 23 bp, Artificial Sequence
  human ApoB siRNA sequence
cacttggagtgccagtttgaaaa

SEQ ID NO: 11953 - DNA, 23 bp, Artificial Sequence
  human ApoB siRNA sequence
acttggagtgccagtttgaaaaa

SEQ ID NO: 11954 - DNA, 23 bp, Artificial Sequence
  human ApoB siRNA sequence
cttggagtgccagtttgaaaaac

SEQ ID NO: 11955 - DNA, 23 bp, Artificial Sequence
  human ApoB siRNA sequence
ttggagtgccagtttgaaaaaca

SEQ ID NO: 11956 - DNA, 23 bp, Artificial Sequence
  human ApoB siRNA sequence
tggagtgccagtttgaaaaacaa

SEQ ID NO: 11957 - DNA, 23 bp, Artificial Sequence
  human ApoB siRNA sequence
ggagtgccagtttgaaaaacaaa

SEQ ID NO: 11958 - DNA, 23 bp, Artificial Sequence
  human ApoB siRNA sequence
gagtgccagtttgaaaaacaaag

SEQ ID NO: 11959 - DNA, 23 bp, Artificial Sequence
  human ApoB siRNA sequence
agtgccagtttgaaaaacaaagc

SEQ ID NO: 11960 - DNA, 23 bp, Artificial Sequence
  human ApoB siRNA sequence
gtgccagtttgaaaaacaaagca

SEQ ID NO: 11961 - DNA, 23 bp, Artificial Sequence
  human ApoB siRNA sequence
tgccagtttgaaaaacaaagcag

SEQ ID NO: 11962 - DNA, 23 bp, Artificial Sequence
  human ApoB siRNA sequence
gccagtttgaaaaacaaagcaga

SEQ ID NO: 11963 - DNA, 23 bp, Artificial Sequence
  human ApoB siRNA sequence
ccagtttgaaaaacaaagcagat

SEQ ID NO: 11964 - DNA, 23 bp, Artificial Sequence
  human ApoB siRNA sequence
cagtttgaaaaacaaagcagatt

SEQ ID NO: 11965 - DNA, 23 bp, Artificial Sequence
  human ApoB siRNA sequence
agtttgaaaaacaaagcagatta

SEQ ID NO: 11966 - DNA, 23 bp, Artificial Sequence
  human ApoB siRNA sequence
gtttgaaaaacaaagcagattat

SEQ ID NO: 11967 - DNA, 23 bp, Artificial Sequence
  human ApoB siRNA sequence
tttgaaaaacaaagcagattatg

SEQ ID NO: 11968 - DNA, 23 bp, Artificial Sequence
  human ApoB siRNA sequence
ttgaaaaacaaagcagattatgt

SEQ ID NO: 11969 - DNA, 23 bp, Artificial Sequence
  human ApoB siRNA sequence
tgaaaaacaaagcagattatgtt

SEQ ID NO: 11970 - DNA, 23 bp, Artificial Sequence
  human ApoB siRNA sequence
gaaaaacaaagcagattatgttg

SEQ ID NO: 11971 - DNA, 23 bp, Artificial Sequence
  human ApoB siRNA sequence
aaaaacaaagcagattatgttga

SEQ ID NO: 11972 - DNA, 23 bp, Artificial Sequence
  human ApoB siRNA sequence
aaaacaaagcagattatgttgaa

SEQ ID NO: 11973 - DNA, 23 bp, Artificial Sequence
  human ApoB siRNA sequence
aaacaaagcagattatgttgaaa

SEQ ID NO: 11974 - DNA, 23 bp, Artificial Sequence
  human ApoB siRNA sequence
aacaaagcagattatgttgaaac

SEQ ID NO: 11975 - DNA, 23 bp, Artificial Sequence
  human ApoB siRNA sequence
acaaagcagattatgttgaaaca

SEQ ID NO: 11976 - DNA, 23 bp, Artificial Sequence
  human ApoB siRNA sequence
caaagcagattatgttgaaacag

SEQ ID NO: 11977 - DNA, 23 bp, Artificial Sequence
  human ApoB siRNA sequence
aaagcagattatgttgaaacagt

SEQ ID NO: 11978 - DNA, 23 bp, Artificial Sequence
  human ApoB siRNA sequence
aagcagattatgttgaaacagtc

SEQ ID NO: 11979 - DNA, 23 bp, Artificial Sequence
  human ApoB siRNA sequence
agcagattatgttgaaacagtcc

SEQ ID NO: 11980 - DNA, 23 bp, Artificial Sequence
  human ApoB siRNA sequence
gcagattatgttgaaacagtcct

SEQ ID NO: 11981 - DNA, 23 bp, Artificial Sequence
  human ApoB siRNA sequence
cagattatgttgaaacagtcctg

SEQ ID NO: 11982 - DNA, 23 bp, Artificial Sequence
  human ApoB siRNA sequence
agattatgttgaaacagtcctgg

SEQ ID NO: 11983 - DNA, 23 bp, Artificial Sequence
  human ApoB siRNA sequence
gattatgttgaaacagtcctgga

SEQ ID NO: 11984 - DNA, 23 bp, Artificial Sequence
  human ApoB siRNA sequence
attatgttgaaacagtcctggat

SEQ ID NO: 11985 - DNA, 23 bp, Artificial Sequence
  human ApoB siRNA sequence
ttatgttgaaacagtcctggatt

SEQ ID NO: 11986 - DNA, 23 bp, Artificial Sequence
  human ApoB siRNA sequence
tatgttgaaacagtcctggattc

SEQ ID NO: 11987 - DNA, 23 bp, Artificial Sequence
  human ApoB siRNA sequence
atgttgaaacagtcctggattcc

SEQ ID NO: 11988 - DNA, 23 bp, Artificial Sequence
  human ApoB siRNA sequence
tgttgaaacagtcctggattcca

SEQ ID NO: 11989 - DNA, 23 bp, Artificial Sequence
  human ApoB siRNA sequence
gttgaaacagtcctggattccac

SEQ ID NO: 11990 - DNA, 23 bp, Artificial Sequence
  human ApoB siRNA sequence
ttgaaacagtcctggattccaca

SEQ ID NO: 11991 - DNA, 23 bp, Artificial Sequence
  human ApoB siRNA sequence
tgaaacagtcctggattccacat

SEQ ID NO: 11992 - DNA, 23 bp, Artificial Sequence
  human ApoB siRNA sequence
gaaacagtcctggattccacatg

SEQ ID NO: 11993 - DNA, 23 bp, Artificial Sequence
  human ApoB siRNA sequence
aaacagtcctggattccacatgc

SEQ ID NO: 11994 - DNA, 23 bp, Artificial Sequence
  human ApoB siRNA sequence
aacagtcctggattccacatgca

SEQ ID NO: 11995 - DNA, 23 bp, Artificial Sequence
  human ApoB siRNA sequence
acagtcctggattccacatgcag

SEQ ID NO: 11996 - DNA, 23 bp, Artificial Sequence
  human ApoB siRNA sequence
cagtcctggattccacatgcagc

SEQ ID NO: 11997 - DNA, 23 bp, Artificial Sequence
  human ApoB siRNA sequence
agtcctggattccacatgcagct

SEQ ID NO: 11998 - DNA, 23 bp, Artificial Sequence
  human ApoB siRNA sequence
gtcctggattccacatgcagctc

SEQ ID NO: 11999 - DNA, 23 bp, Artificial Sequence
  human ApoB siRNA sequence
tcctggattccacatgcagctca

SEQ ID NO: 12000 - DNA, 23 bp, Artificial Sequence
  human ApoB siRNA sequence
cctggattccacatgcagctcaa

SEQ ID NO: 12001 - DNA, 23 bp, Artificial Sequence
  human ApoB siRNA sequence
ctggattccacatgcagctcaac

SEQ ID NO: 12002 - DNA, 23 bp, Artificial Sequence
  human ApoB siRNA sequence
tggattccacatgcagctcaacc

SEQ ID NO: 12003 - DNA, 23 bp, Artificial Sequence
  human ApoB siRNA sequence
ggattccacatgcagctcaaccg

SEQ ID NO: 12004 - DNA, 23 bp, Artificial Sequence
  human ApoB siRNA sequence
gattccacatgcagctcaaccgt

SEQ ID NO: 12005 - DNA, 23 bp, Artificial Sequence
  human ApoB siRNA sequence
attccacatgcagctcaaccgta

SEQ ID NO: 12006 - DNA, 23 bp, Artificial Sequence
  human ApoB siRNA sequence
ttccacatgcagctcaaccgtac

SEQ ID NO: 12007 - DNA, 23 bp, Artificial Sequence
  human ApoB siRNA sequence
tccacatgcagctcaaccgtaca

SEQ ID NO: 12008 - DNA, 23 bp, Artificial Sequence
  human ApoB siRNA sequence
ccacatgcagctcaaccgtacag

SEQ ID NO: 12009 - DNA, 23 bp, Artificial Sequence
  human ApoB siRNA sequence
cacatgcagctcaaccgtacagt

SEQ ID NO: 12010 - DNA, 23 bp, Artificial Sequence
  human ApoB siRNA sequence
acatgcagctcaaccgtacagtt

SEQ ID NO: 12011 - DNA, 23 bp, Artificial Sequence
  human ApoB siRNA sequence
catgcagctcaaccgtacagttc

SEQ ID NO: 12012 - DNA, 23 bp, Artificial Sequence
  human ApoB siRNA sequence
atgcagctcaaccgtacagttcc

SEQ ID NO: 12013 - DNA, 23 bp, Artificial Sequence
  human ApoB siRNA sequence
tgcagctcaaccgtacagttcct

SEQ ID NO: 12014 - DNA, 23 bp, Artificial Sequence
  human ApoB siRNA sequence
gcagctcaaccgtacagttccta

SEQ ID NO: 12015 - DNA, 23 bp, Artificial Sequence
  human ApoB siRNA sequence
cagctcaaccgtacagttcctag

SEQ ID NO: 12016 - DNA, 23 bp, Artificial Sequence
  human ApoB siRNA sequence
agctcaaccgtacagttcctaga

SEQ ID NO: 12017 - DNA, 23 bp, Artificial Sequence
  human ApoB siRNA sequence
gctcaaccgtacagttcctagaa

SEQ ID NO: 12018 - DNA, 23 bp, Artificial Sequence
  human ApoB siRNA sequence
ctcaaccgtacagttcctagaat

SEQ ID NO: 12019 - DNA, 23 bp, Artificial Sequence
  human ApoB siRNA sequence
tcaaccgtacagttcctagaata

SEQ ID NO: 12020 - DNA, 23 bp, Artificial Sequence
  human ApoB siRNA sequence
caaccgtacagttcctagaatat

SEQ ID NO: 12021 - DNA, 23 bp, Artificial Sequence
  human ApoB siRNA sequence
aaccgtacagttcctagaatatg

SEQ ID NO: 12022 - DNA, 23 bp, Artificial Sequence
  human ApoB siRNA sequence
accgtacagttcctagaatatga

SEQ ID NO: 12023 - DNA, 23 bp, Artificial Sequence
  human ApoB siRNA sequence
ccgtacagttcctagaatatgaa

SEQ ID NO: 12024 - DNA, 23 bp, Artificial Sequence
  human ApoB siRNA sequence
cgtacagttcctagaatatgaac

SEQ ID NO: 12025 - DNA, 23 bp, Artificial Sequence
  human ApoB siRNA sequence
gtacagttcctagaatatgaact

SEQ ID NO: 12026 - DNA, 23 bp, Artificial Sequence
  human ApoB siRNA sequence
tacagttcctagaatatgaacta

SEQ ID NO: 12027 - DNA, 23 bp, Artificial Sequence
  human ApoB siRNA sequence
acagttcctagaatatgaactaa

SEQ ID NO: 12028 - DNA, 23 bp, Artificial Sequence
  human ApoB siRNA sequence
cagttcctagaatatgaactaaa

SEQ ID NO: 12029 - DNA, 23 bp, Artificial Sequence
  human ApoB siRNA sequence
agttcctagaatatgaactaaat

SEQ ID NO: 12030 - DNA, 23 bp, Artificial Sequence
  human ApoB siRNA sequence
gttcctagaatatgaactaaatg

SEQ ID NO: 12031 - DNA, 23 bp, Artificial Sequence
  human ApoB siRNA sequence
ttcctagaatatgaactaaatgt

SEQ ID NO: 12032 - DNA, 23 bp, Artificial Sequence
  human ApoB siRNA sequence
tcctagaatatgaactaaatgtt

SEQ ID NO: 12033 - DNA, 23 bp, Artificial Sequence
  human ApoB siRNA sequence
cctagaatatgaactaaatgttt

SEQ ID NO: 12034 - DNA, 23 bp, Artificial Sequence
  human ApoB siRNA sequence
ctagaatatgaactaaatgtttt

SEQ ID NO: 12035 - DNA, 23 bp, Artificial Sequence
  human ApoB siRNA sequence
tagaatatgaactaaatgttttg

SEQ ID NO: 12036 - DNA, 23 bp, Artificial Sequence
  human ApoB siRNA sequence
agaatatgaactaaatgttttgg

SEQ ID NO: 12037 - DNA, 23 bp, Artificial Sequence
  human ApoB siRNA sequence
gaatatgaactaaatgttttggg

SEQ ID NO: 12038 - DNA, 23 bp, Artificial Sequence
  human ApoB siRNA sequence
aatatgaactaaatgttttggga

SEQ ID NO: 12039 - DNA, 23 bp, Artificial Sequence
  human ApoB siRNA sequence
atatgaactaaatgttttgggaa

SEQ ID NO: 12040 - DNA, 23 bp, Artificial Sequence
  human ApoB siRNA sequence
tatgaactaaatgttttgggaac

SEQ ID NO: 12041 - DNA, 23 bp, Artificial Sequence
  human ApoB siRNA sequence
atgaactaaatgttttgggaaca

SEQ ID NO: 12042 - DNA, 23 bp, Artificial Sequence
  human ApoB siRNA sequence
tgaactaaatgttttgggaacac

SEQ ID NO: 12043 - DNA, 23 bp, Artificial Sequence
  human ApoB siRNA sequence
gaactaaatgttttgggaacaca

SEQ ID NO: 12044 - DNA, 23 bp, Artificial Sequence
  human ApoB siRNA sequence
aactaaatgttttgggaacacac

SEQ ID NO: 12045 - DNA, 23 bp, Artificial Sequence
  human ApoB siRNA sequence
actaaatgttttgggaacacaca

SEQ ID NO: 12046 - DNA, 23 bp, Artificial Sequence
  human ApoB siRNA sequence
ctaaatgttttgggaacacacaa

SEQ ID NO: 12047 - DNA, 23 bp, Artificial Sequence
  human ApoB siRNA sequence
taaatgttttgggaacacacaaa

SEQ ID NO: 12048 - DNA, 23 bp, Artificial Sequence
  human ApoB siRNA sequence
aaatgttttgggaacacacaaaa

SEQ ID NO: 12049 - DNA, 23 bp, Artificial Sequence
  human ApoB siRNA sequence
aatgttttgggaacacacaaaat

SEQ ID NO: 12050 - DNA, 23 bp, Artificial Sequence
  human ApoB siRNA sequence
atgttttgggaacacacaaaatc

SEQ ID NO: 12051 - DNA, 23 bp, Artificial Sequence
  human ApoB siRNA sequence
tgttttgggaacacacaaaatcg

SEQ ID NO: 12052 - DNA, 23 bp, Artificial Sequence
  human ApoB siRNA sequence
gttttgggaacacacaaaatcga

SEQ ID NO: 12053 - DNA, 23 bp, Artificial Sequence
  human ApoB siRNA sequence
ttttgggaacacacaaaatcgaa

SEQ ID NO: 12054 - DNA, 23 bp, Artificial Sequence
  human ApoB siRNA sequence
tttgggaacacacaaaatcgaag

SEQ ID NO: 12055 - DNA, 23 bp, Artificial Sequence
  human ApoB siRNA sequence
ttgggaacacacaaaatcgaaga

SEQ ID NO: 12056 - DNA, 23 bp, Artificial Sequence
  human ApoB siRNA sequence
tgggaacacacaaaatcgaagat

SEQ ID NO: 12057 - DNA, 23 bp, Artificial Sequence
  human ApoB siRNA sequence
gggaacacacaaaatcgaagatg

SEQ ID NO: 12058 - DNA, 23 bp, Artificial Sequence
  human ApoB siRNA sequence
ggaacacacaaaatcgaagatgg

SEQ ID NO: 12059 - DNA, 23 bp, Artificial Sequence
  human ApoB siRNA sequence
gaacacacaaaatcgaagatggt

SEQ ID NO: 12060 - DNA, 23 bp, Artificial Sequence
  human ApoB siRNA sequence
aacacacaaaatcgaagatggta

SEQ ID NO: 12061 - DNA, 23 bp, Artificial Sequence
  human ApoB siRNA sequence
acacacaaaatcgaagatggtac

SEQ ID NO: 12062 - DNA, 23 bp, Artificial Sequence
  human ApoB siRNA sequence
cacacaaaatcgaagatggtacg

SEQ ID NO: 12063 - DNA, 23 bp, Artificial Sequence
  human ApoB siRNA sequence
acacaaaatcgaagatggtacgt

SEQ ID NO: 12064 - DNA, 23 bp, Artificial Sequence
  human ApoB siRNA sequence
cacaaaatcgaagatggtacgtt

SEQ ID NO: 12065 - DNA, 23 bp, Artificial Sequence
  human ApoB siRNA sequence
acaaaatcgaagatggtacgtta

SEQ ID NO: 12066 - DNA, 23 bp, Artificial Sequence
  human ApoB siRNA sequence
caaaatcgaagatggtacgttag

SEQ ID NO: 12067 - DNA, 23 bp, Artificial Sequence
  human ApoB siRNA sequence
aaaatcgaagatggtacgttagc

SEQ ID NO: 12068 - DNA, 23 bp, Artificial Sequence
  human ApoB siRNA sequence
aaatcgaagatggtacgttagcc

SEQ ID NO: 12069 - DNA, 23 bp, Artificial Sequence
  human ApoB siRNA sequence
aatcgaagatggtacgttagcct

SEQ ID NO: 12070 - DNA, 23 bp, Artificial Sequence
  human ApoB siRNA sequence
atcgaagatggtacgttagcctc

SEQ ID NO: 12071 - DNA, 23 bp, Artificial Sequence
  human ApoB siRNA sequence
tcgaagatggtacgttagcctct

SEQ ID NO: 12072 - DNA, 23 bp, Artificial Sequence
  human ApoB siRNA sequence
cgaagatggtacgttagcctcta

SEQ ID NO: 12073 - DNA, 23 bp, Artificial Sequence
  human ApoB siRNA sequence
gaagatggtacgttagcctctaa

SEQ ID NO: 12074 - DNA, 23 bp, Artificial Sequence
  human ApoB siRNA sequence
aagatggtacgttagcctctaag

SEQ ID NO: 12075 - DNA, 23 bp, Artificial Sequence
  human ApoB siRNA sequence
agatggtacgttagcctctaaga

SEQ ID NO: 12076 - DNA, 23 bp, Artificial Sequence
  human ApoB siRNA sequence
gatggtacgttagcctctaagac

SEQ ID NO: 12077 - DNA, 23 bp, Artificial Sequence
  human ApoB siRNA sequence
atggtacgttagcctctaagact

SEQ ID NO: 12078 - DNA, 23 bp, Artificial Sequence
  human ApoB siRNA sequence
tggtacgttagcctctaagacta

SEQ ID NO: 12079 - DNA, 23 bp, Artificial Sequence
  human ApoB siRNA sequence
ggtacgttagcctctaagactaa

SEQ ID NO: 12080 - DNA, 23 bp, Artificial Sequence
  human ApoB siRNA sequence
gtacgttagcctctaagactaaa

SEQ ID NO: 12081 - DNA, 23 bp, Artificial Sequence
  human ApoB siRNA sequence
tacgttagcctctaagactaaag

SEQ ID NO: 12082 - DNA, 23 bp, Artificial Sequence
  human ApoB siRNA sequence
acgttagcctctaagactaaagg

SEQ ID NO: 12083 - DNA, 23 bp, Artificial Sequence
  human ApoB siRNA sequence
cgttagcctctaagactaaagga

SEQ ID NO: 12084 - DNA, 23 bp, Artificial Sequence
  human ApoB siRNA sequence
gttagcctctaagactaaaggaa

SEQ ID NO: 12085 - DNA, 23 bp, Artificial Sequence
  human ApoB siRNA sequence
ttagcctctaagactaaaggaac

SEQ ID NO: 12086 - DNA, 23 bp, Artificial Sequence
  human ApoB siRNA sequence
tagcctctaagactaaaggaaca

SEQ ID NO: 12087 - DNA, 23 bp, Artificial Sequence
  human ApoB siRNA sequence
agcctctaagactaaaggaacac

SEQ ID NO: 12088 - DNA, 23 bp, Artificial Sequence
  human ApoB siRNA sequence
gcctctaagactaaaggaacact

SEQ ID NO: 12089 - DNA, 23 bp, Artificial Sequence
  human ApoB siRNA sequence
cctctaagactaaaggaacactt

SEQ ID NO: 12090 - DNA, 23 bp, Artificial Sequence
  human ApoB siRNA sequence
ctctaagactaaaggaacacttg

SEQ ID NO: 12091 - DNA, 23 bp, Artificial Sequence
  human ApoB siRNA sequence
tctaagactaaaggaacacttgc

SEQ ID NO: 12092 - DNA, 23 bp, Artificial Sequence
  human ApoB siRNA sequence
ctaagactaaaggaacacttgca

SEQ ID NO: 12093 - DNA, 23 bp, Artificial Sequence
  human ApoB siRNA sequence
taagactaaaggaacacttgcac

SEQ ID NO: 12094 - DNA, 23 bp, Artificial Sequence
  human ApoB siRNA sequence
aagactaaaggaacacttgcaca

SEQ ID NO: 12095 - DNA, 23 bp, Artificial Sequence
  human ApoB siRNA sequence
agactaaaggaacacttgcacac

SEQ ID NO: 12096 - DNA, 23 bp, Artificial Sequence
  human ApoB siRNA sequence
gactaaaggaacacttgcacacc

SEQ ID NO: 12097 - DNA, 23 bp, Artificial Sequence
  human ApoB siRNA sequence
actaaaggaacacttgcacaccg

SEQ ID NO: 12098 - DNA, 23 bp, Artificial Sequence
  human ApoB siRNA sequence
ctaaaggaacacttgcacaccgt

SEQ ID NO: 12099 - DNA, 23 bp, Artificial Sequence
  human ApoB siRNA sequence
taaaggaacacttgcacaccgtg

SEQ ID NO: 12100 - DNA, 23 bp, Artificial Sequence
  human ApoB siRNA sequence
aaaggaacacttgcacaccgtga

SEQ ID NO: 12101 - DNA, 23 bp, Artificial Sequence
  human ApoB siRNA sequence
aaggaacacttgcacaccgtgac

SEQ ID NO: 12102 - DNA, 23 bp, Artificial Sequence
  human ApoB siRNA sequence
aggaacacttgcacaccgtgact

SEQ ID NO: 12103 - DNA, 23 bp, Artificial Sequence
  human ApoB siRNA sequence
ggaacacttgcacaccgtgactt

SEQ ID NO: 12104 - DNA, 23 bp, Artificial Sequence
  human ApoB siRNA sequence
gaacacttgcacaccgtgacttc

SEQ ID NO: 12105 - DNA, 23 bp, Artificial Sequence
  human ApoB siRNA sequence
aacacttgcacaccgtgacttca

SEQ ID NO: 12106 - DNA, 23 bp, Artificial Sequence
  human ApoB siRNA sequence
acacttgcacaccgtgacttcag

SEQ ID NO: 12107 - DNA, 23 bp, Artificial Sequence
  human ApoB siRNA sequence
cacttgcacaccgtgacttcagt

SEQ ID NO: 12108 - DNA, 23 bp, Artificial Sequence
  human ApoB siRNA sequence
acttgcacaccgtgacttcagtg

SEQ ID NO: 12109 - DNA, 23 bp, Artificial Sequence
  human ApoB siRNA sequence
cttgcacaccgtgacttcagtgc

SEQ ID NO: 12110 - DNA, 23 bp, Artificial Sequence
  human ApoB siRNA sequence
ttgcacaccgtgacttcagtgca

SEQ ID NO: 12111 - DNA, 23 bp, Artificial Sequence
  human ApoB siRNA sequence
tgcacaccgtgacttcagtgcag

SEQ ID NO: 12112 - DNA, 23 bp, Artificial Sequence
  human ApoB siRNA sequence
gcacaccgtgacttcagtgcaga

SEQ ID NO: 12113 - DNA, 23 bp, Artificial Sequence
  human ApoB siRNA sequence
cacaccgtgacttcagtgcagaa

SEQ ID NO: 12114 - DNA, 23 bp, Artificial Sequence
  human ApoB siRNA sequence
acaccgtgacttcagtgcagaat

SEQ ID NO: 12115 - DNA, 23 bp, Artificial Sequence
  human ApoB siRNA sequence
caccgtgacttcagtgcagaata

SEQ ID NO: 12116 - DNA, 23 bp, Artificial Sequence
  human ApoB siRNA sequence
accgtgacttcagtgcagaatat

SEQ ID NO: 12117 - DNA, 23 bp, Artificial Sequence
  human ApoB siRNA sequence
ccgtgacttcagtgcagaatatg

SEQ ID NO: 12118 - DNA, 23 bp, Artificial Sequence
  human ApoB siRNA sequence
cgtgacttcagtgcagaatatga

SEQ ID NO: 12119 - DNA, 23 bp, Artificial Sequence
  human ApoB siRNA sequence
gtgacttcagtgcagaatatgaa

SEQ ID NO: 12120 - DNA, 23 bp, Artificial Sequence
  human ApoB siRNA sequence
tgacttcagtgcagaatatgaag

SEQ ID NO: 12121 - DNA, 23 bp, Artificial Sequence
  human ApoB siRNA sequence
gacttcagtgcagaatatgaaga

SEQ ID NO: 12122 - DNA, 23 bp, Artificial Sequence
  human ApoB siRNA sequence
acttcagtgcagaatatgaagaa

SEQ ID NO: 12123 - DNA, 23 bp, Artificial Sequence
  human ApoB siRNA sequence
cttcagtgcagaatatgaagaag

SEQ ID NO: 12124 - DNA, 23 bp, Artificial Sequence
  human ApoB siRNA sequence
ttcagtgcagaatatgaagaaga

SEQ ID NO: 12125 - DNA, 23 bp, Artificial Sequence
  human ApoB siRNA sequence
tcagtgcagaatatgaagaagat

SEQ ID NO: 12126 - DNA, 23 bp, Artificial Sequence
  human ApoB siRNA sequence
cagtgcagaatatgaagaagatg

SEQ ID NO: 12127 - DNA, 23 bp, Artificial Sequence
  human ApoB siRNA sequence
agtgcagaatatgaagaagatgg

SEQ ID NO: 12128 - DNA, 23 bp, Artificial Sequence
  human ApoB siRNA sequence
gtgcagaatatgaagaagatggc

SEQ ID NO: 12129 - DNA, 23 bp, Artificial Sequence
  human ApoB siRNA sequence
tgcagaatatgaagaagatggca

SEQ ID NO: 12130 - DNA, 23 bp, Artificial Sequence
  human ApoB siRNA sequence
gcagaatatgaagaagatggcaa

SEQ ID NO: 12131 - DNA, 23 bp, Artificial Sequence
  human ApoB siRNA sequence
cagaatatgaagaagatggcaaa

SEQ ID NO: 12132 - DNA, 23 bp, Artificial Sequence
  human ApoB siRNA sequence
agaatatgaagaagatggcaaat

SEQ ID NO: 12133 - DNA, 23 bp, Artificial Sequence
  human ApoB siRNA sequence
gaatatgaagaagatggcaaatt

SEQ ID NO: 12134 - DNA, 23 bp, Artificial Sequence
  human ApoB siRNA sequence
aatatgaagaagatggcaaattt

SEQ ID NO: 12135 - DNA, 23 bp, Artificial Sequence
  human ApoB siRNA sequence
atatgaagaagatggcaaatttg

SEQ ID NO: 12136 - DNA, 23 bp, Artificial Sequence
  human ApoB siRNA sequence
tatgaagaagatggcaaatttga

SEQ ID NO: 12137 - DNA, 23 bp, Artificial Sequence
  human ApoB siRNA sequence
atgaagaagatggcaaatttgaa

SEQ ID NO: 12138 - DNA, 23 bp, Artificial Sequence
  human ApoB siRNA sequence
tgaagaagatggcaaatttgaag

SEQ ID NO: 12139 - DNA, 23 bp, Artificial Sequence
  human ApoB siRNA sequence
gaagaagatggcaaatttgaagg

SEQ ID NO: 12140 - DNA, 23 bp, Artificial Sequence
  human ApoB siRNA sequence
aagaagatggcaaatttgaagga

SEQ ID NO: 12141 - DNA, 23 bp, Artificial Sequence
  human ApoB siRNA sequence
agaagatggcaaatttgaaggac

SEQ ID NO: 12142 - DNA, 23 bp, Artificial Sequence
  human ApoB siRNA sequence
gaagatggcaaatttgaaggact

SEQ ID NO: 12143 - DNA, 23 bp, Artificial Sequence
  human ApoB siRNA sequence
aagatggcaaatttgaaggactt

SEQ ID NO: 12144 - DNA, 23 bp, Artificial Sequence
  human ApoB siRNA sequence
agatggcaaatttgaaggacttc

SEQ ID NO: 12145 - DNA, 23 bp, Artificial Sequence
  human ApoB siRNA sequence
gatggcaaatttgaaggacttca

SEQ ID NO: 12146 - DNA, 23 bp, Artificial Sequence
  human ApoB siRNA sequence
atggcaaatttgaaggacttcag

SEQ ID NO: 12147 - DNA, 23 bp, Artificial Sequence
  human ApoB siRNA sequence
tggcaaatttgaaggacttcagg

SEQ ID NO: 12148 - DNA, 23 bp, Artificial Sequence
  human ApoB siRNA sequence
ggcaaatttgaaggacttcagga

SEQ ID NO: 12149 - DNA, 23 bp, Artificial Sequence
  human ApoB siRNA sequence
gcaaatttgaaggacttcaggaa

SEQ ID NO: 12150 - DNA, 23 bp, Artificial Sequence
  human ApoB siRNA sequence
caaatttgaaggacttcaggaat

SEQ ID NO: 12151 - DNA, 23 bp, Artificial Sequence
  human ApoB siRNA sequence
aaatttgaaggacttcaggaatg

SEQ ID NO: 12152 - DNA, 23 bp, Artificial Sequence
  human ApoB siRNA sequence
aatttgaaggacttcaggaatgg

SEQ ID NO: 12153 - DNA, 23 bp, Artificial Sequence
  human ApoB siRNA sequence
atttgaaggacttcaggaatggg

SEQ ID NO: 12154 - DNA, 23 bp, Artificial Sequence
  human ApoB siRNA sequence
tttgaaggacttcaggaatggga

SEQ ID NO: 12155 - DNA, 23 bp, Artificial Sequence
  human ApoB siRNA sequence
ttgaaggacttcaggaatgggaa

SEQ ID NO: 12156 - DNA, 23 bp, Artificial Sequence
  human ApoB siRNA sequence
tgaaggacttcaggaatgggaag

SEQ ID NO: 12157 - DNA, 23 bp, Artificial Sequence
  human ApoB siRNA sequence
gaaggacttcaggaatgggaagg

SEQ ID NO: 12158 - DNA, 23 bp, Artificial Sequence
  human ApoB siRNA sequence
aaggacttcaggaatgggaagga

SEQ ID NO: 12159 - DNA, 23 bp, Artificial Sequence
  human ApoB siRNA sequence
aggacttcaggaatgggaaggaa

SEQ ID NO: 12160 - DNA, 23 bp, Artificial Sequence
  human ApoB siRNA sequence
ggacttcaggaatgggaaggaaa

SEQ ID NO: 12161 - DNA, 23 bp, Artificial Sequence
  human ApoB siRNA sequence
gacttcaggaatgggaaggaaaa

SEQ ID NO: 12162 - DNA, 23 bp, Artificial Sequence
  human ApoB siRNA sequence
acttcaggaatgggaaggaaaag

SEQ ID NO: 12163 - DNA, 23 bp, Artificial Sequence
  human ApoB siRNA sequence
cttcaggaatgggaaggaaaagc

SEQ ID NO: 12164 - DNA, 23 bp, Artificial Sequence
  human ApoB siRNA sequence
ttcaggaatgggaaggaaaagcg

SEQ ID NO: 12165 - DNA, 23 bp, Artificial Sequence
  human ApoB siRNA sequence
tcaggaatgggaaggaaaagcgc

SEQ ID NO: 12166 - DNA, 23 bp, Artificial Sequence
  human ApoB siRNA sequence
caggaatgggaaggaaaagcgca

SEQ ID NO: 12167 - DNA, 23 bp, Artificial Sequence
  human ApoB siRNA sequence
aggaatgggaaggaaaagcgcac

SEQ ID NO: 12168 - DNA, 23 bp, Artificial Sequence
  human ApoB siRNA sequence
ggaatgggaaggaaaagcgcacc

SEQ ID NO: 12169 - DNA, 23 bp, Artificial Sequence
  human ApoB siRNA sequence
gaatgggaaggaaaagcgcacct

SEQ ID NO: 12170 - DNA, 23 bp, Artificial Sequence
  human ApoB siRNA sequence
aatgggaaggaaaagcgcacctc

SEQ ID NO: 12171 - DNA, 23 bp, Artificial Sequence
  human ApoB siRNA sequence
atgggaaggaaaagcgcacctca

SEQ ID NO: 12172 - DNA, 23 bp, Artificial Sequence
  human ApoB siRNA sequence
tgggaaggaaaagcgcacctcaa

SEQ ID NO: 12173 - DNA, 23 bp, Artificial Sequence
  human ApoB siRNA sequence
gggaaggaaaagcgcacctcaat

SEQ ID NO: 12174 - DNA, 23 bp, Artificial Sequence
  human ApoB siRNA sequence
ggaaggaaaagcgcacctcaata

SEQ ID NO: 12175 - DNA, 23 bp, Artificial Sequence
  human ApoB siRNA sequence
gaaggaaaagcgcacctcaatat

SEQ ID NO: 12176 - DNA, 23 bp, Artificial Sequence
  human ApoB siRNA sequence
aaggaaaagcgcacctcaatatc

SEQ ID NO: 12177 - DNA, 23 bp, Artificial Sequence
  human ApoB siRNA sequence
aggaaaagcgcacctcaatatca

SEQ ID NO: 12178 - DNA, 23 bp, Artificial Sequence
  human ApoB siRNA sequence
ggaaaagcgcacctcaatatcaa

SEQ ID NO: 12179 - DNA, 23 bp, Artificial Sequence
  human ApoB siRNA sequence
gaaaagcgcacctcaatatcaaa

SEQ ID NO: 12180 - DNA, 23 bp, Artificial Sequence
  human ApoB siRNA sequence
aaaagcgcacctcaatatcaaaa

SEQ ID NO: 12181 - DNA, 23 bp, Artificial Sequence
  human ApoB siRNA sequence
aaagcgcacctcaatatcaaaag

SEQ ID NO: 12182 - DNA, 23 bp, Artificial Sequence
  human ApoB siRNA sequence
aagcgcacctcaatatcaaaagc

SEQ ID NO: 12183 - DNA, 23 bp, Artificial Sequence
  human ApoB siRNA sequence
agcgcacctcaatatcaaaagcc

SEQ ID NO: 12184 - DNA, 23 bp, Artificial Sequence
  human ApoB siRNA sequence
gcgcacctcaatatcaaaagccc

SEQ ID NO: 12185 - DNA, 23 bp, Artificial Sequence
  human ApoB siRNA sequence
cgcacctcaatatcaaaagccca

SEQ ID NO: 12186 - DNA, 23 bp, Artificial Sequence
  human ApoB siRNA sequence
gcacctcaatatcaaaagcccag

SEQ ID NO: 12187 - DNA, 23 bp, Artificial Sequence
  human ApoB siRNA sequence
cacctcaatatcaaaagcccagc

SEQ ID NO: 12188 - DNA, 23 bp, Artificial Sequence
  human ApoB siRNA sequence
acctcaatatcaaaagcccagcg

SEQ ID NO: 12189 - DNA, 23 bp, Artificial Sequence
  human ApoB siRNA sequence
cctcaatatcaaaagcccagcgt

SEQ ID NO: 12190 - DNA, 23 bp, Artificial Sequence
  human ApoB siRNA sequence
ctcaatatcaaaagcccagcgtt

SEQ ID NO: 12191 - DNA, 23 bp, Artificial Sequence
  human ApoB siRNA sequence
tcaatatcaaaagcccagcgttc

SEQ ID NO: 12192 - DNA, 23 bp, Artificial Sequence
  human ApoB siRNA sequence
caatatcaaaagcccagcgttca

SEQ ID NO: 12193 - DNA, 23 bp, Artificial Sequence
  human ApoB siRNA sequence
aatatcaaaagcccagcgttcac

SEQ ID NO: 12194 - DNA, 23 bp, Artificial Sequence
  human ApoB siRNA sequence
atatcaaaagcccagcgttcacc

SEQ ID NO: 12195 - DNA, 23 bp, Artificial Sequence
  human ApoB siRNA sequence
tatcaaaagcccagcgttcaccg

SEQ ID NO: 12196 - DNA, 23 bp, Artificial Sequence
  human ApoB siRNA sequence
atcaaaagcccagcgttcaccga

SEQ ID NO: 12197 - DNA, 23 bp, Artificial Sequence
  human ApoB siRNA sequence
tcaaaagcccagcgttcaccgat

SEQ ID NO: 12198 - DNA, 23 bp, Artificial Sequence
  human ApoB siRNA sequence
caaaagcccagcgttcaccgatc

SEQ ID NO: 12199 - DNA, 23 bp, Artificial Sequence
  human ApoB siRNA sequence
aaaagcccagcgttcaccgatct

SEQ ID NO: 12200 - DNA, 23 bp, Artificial Sequence
  human ApoB siRNA sequence
aaagcccagcgttcaccgatctc

SEQ ID NO: 12201 - DNA, 23 bp, Artificial Sequence
  human ApoB siRNA sequence
aagcccagcgttcaccgatctcc

SEQ ID NO: 12202 - DNA, 23 bp, Artificial Sequence
  human ApoB siRNA sequence
agcccagcgttcaccgatctcca

SEQ ID NO: 12203 - DNA, 23 bp, Artificial Sequence
  human ApoB siRNA sequence
gcccagcgttcaccgatctccat

SEQ ID NO: 12204 - DNA, 23 bp, Artificial Sequence
  human ApoB siRNA sequence
cccagcgttcaccgatctccatc

SEQ ID NO: 12205 - DNA, 23 bp, Artificial Sequence
  human ApoB siRNA sequence
ccagcgttcaccgatctccatct

SEQ ID NO: 12206 - DNA, 23 bp, Artificial Sequence
  human ApoB siRNA sequence
cagcgttcaccgatctccatctg

SEQ ID NO: 12207 - DNA, 23 bp, Artificial Sequence
  human ApoB siRNA sequence
agcgttcaccgatctccatctgc

SEQ ID NO: 12208 - DNA, 23 bp, Artificial Sequence
  human ApoB siRNA sequence
gcgttcaccgatctccatctgcg

SEQ ID NO: 12209 - DNA, 23 bp, Artificial Sequence
  human ApoB siRNA sequence
cgttcaccgatctccatctgcgc

SEQ ID NO: 12210 - DNA, 23 bp, Artificial Sequence
  human ApoB siRNA sequence
gttcaccgatctccatctgcgct

SEQ ID NO: 12211 - DNA, 23 bp, Artificial Sequence
  human ApoB siRNA sequence
ttcaccgatctccatctgcgcta

SEQ ID NO: 12212 - DNA, 23 bp, Artificial Sequence
  human ApoB siRNA sequence
tcaccgatctccatctgcgctac

SEQ ID NO: 12213 - DNA, 23 bp, Artificial Sequence
  human ApoB siRNA sequence
caccgatctccatctgcgctacc

SEQ ID NO: 12214 - DNA, 23 bp, Artificial Sequence
  human ApoB siRNA sequence
accgatctccatctgcgctacca

SEQ ID NO: 12215 - DNA, 23 bp, Artificial Sequence
  human ApoB siRNA sequence
ccgatctccatctgcgctaccag

SEQ ID NO: 12216 - DNA, 23 bp, Artificial Sequence
  human ApoB siRNA sequence
cgatctccatctgcgctaccaga

SEQ ID NO: 12217 - DNA, 23 bp, Artificial Sequence
  human ApoB siRNA sequence
gatctccatctgcgctaccagaa

SEQ ID NO: 12218 - DNA, 23 bp, Artificial Sequence
  human ApoB siRNA sequence
atctccatctgcgctaccagaaa

SEQ ID NO: 12219 - DNA, 23 bp, Artificial Sequence
  human ApoB siRNA sequence
tctccatctgcgctaccagaaag

SEQ ID NO: 12220 - DNA, 23 bp, Artificial Sequence
  human ApoB siRNA sequence
ctccatctgcgctaccagaaaga

SEQ ID NO: 12221 - DNA, 23 bp, Artificial Sequence
  human ApoB siRNA sequence
tccatctgcgctaccagaaagac

SEQ ID NO: 12222 - DNA, 23 bp, Artificial Sequence
  human ApoB siRNA sequence
ccatctgcgctaccagaaagaca

SEQ ID NO: 12223 - DNA, 23 bp, Artificial Sequence
  human ApoB siRNA sequence
catctgcgctaccagaaagacaa

SEQ ID NO: 12224 - DNA, 23 bp, Artificial Sequence
  human ApoB siRNA sequence
atctgcgctaccagaaagacaag

SEQ ID NO: 12225 - DNA, 23 bp, Artificial Sequence
  human ApoB siRNA sequence
tctgcgctaccagaaagacaaga

SEQ ID NO: 12226 - DNA, 23 bp, Artificial Sequence
  human ApoB siRNA sequence
ctgcgctaccagaaagacaagaa

SEQ ID NO: 12227 - DNA, 23 bp, Artificial Sequence
  human ApoB siRNA sequence
tgcgctaccagaaagacaagaaa

SEQ ID NO: 12228 - DNA, 23 bp, Artificial Sequence
  human ApoB siRNA sequence
gcgctaccagaaagacaagaaag

SEQ ID NO: 12229 - DNA, 23 bp, Artificial Sequence
  human ApoB siRNA sequence
cgctaccagaaagacaagaaagg

SEQ ID NO: 12230 - DNA, 23 bp, Artificial Sequence
  human ApoB siRNA sequence
gctaccagaaagacaagaaaggc

SEQ ID NO: 12231 - DNA, 23 bp, Artificial Sequence
  human ApoB siRNA sequence
ctaccagaaagacaagaaaggca

SEQ ID NO: 12232 - DNA, 23 bp, Artificial Sequence
  human ApoB siRNA sequence
taccagaaagacaagaaaggcat

SEQ ID NO: 12233 - DNA, 23 bp, Artificial Sequence
  human ApoB siRNA sequence
accagaaagacaagaaaggcatc

SEQ ID NO: 12234 - DNA, 23 bp, Artificial Sequence
  human ApoB siRNA sequence
ccagaaagacaagaaaggcatct

SEQ ID NO: 12235 - DNA, 23 bp, Artificial Sequence
  human ApoB siRNA sequence
cagaaagacaagaaaggcatctc

SEQ ID NO: 12236 - DNA, 23 bp, Artificial Sequence
  human ApoB siRNA sequence
agaaagacaagaaaggcatctcc

SEQ ID NO: 12237 - DNA, 23 bp, Artificial Sequence
  human ApoB siRNA sequence
gaaagacaagaaaggcatctcca

SEQ ID NO: 12238 - DNA, 23 bp, Artificial Sequence
  human ApoB siRNA sequence
aaagacaagaaaggcatctccac

SEQ ID NO: 12239 - DNA, 23 bp, Artificial Sequence
  human ApoB siRNA sequence
aagacaagaaaggcatctccacc

SEQ ID NO: 12240 - DNA, 23 bp, Artificial Sequence
  human ApoB siRNA sequence
agacaagaaaggcatctccacct

SEQ ID NO: 12241 - DNA, 23 bp, Artificial Sequence
  human ApoB siRNA sequence
gacaagaaaggcatctccacctc

SEQ ID NO: 12242 - DNA, 23 bp, Artificial Sequence
  human ApoB siRNA sequence
acaagaaaggcatctccacctca

SEQ ID NO: 12243 - DNA, 23 bp, Artificial Sequence
  human ApoB siRNA sequence
caagaaaggcatctccacctcag

SEQ ID NO: 12244 - DNA, 23 bp, Artificial Sequence
  human ApoB siRNA sequence
aagaaaggcatctccacctcagc

SEQ ID NO: 12245 - DNA, 23 bp, Artificial Sequence
  human ApoB siRNA sequence
agaaaggcatctccacctcagca

SEQ ID NO: 12246 - DNA, 23 bp, Artificial Sequence
  human ApoB siRNA sequence
gaaaggcatctccacctcagcag

SEQ ID NO: 12247 - DNA, 23 bp, Artificial Sequence
  human ApoB siRNA sequence
aaaggcatctccacctcagcagc

SEQ ID NO: 12248 - DNA, 23 bp, Artificial Sequence
  human ApoB siRNA sequence
aaggcatctccacctcagcagcc

SEQ ID NO: 12249 - DNA, 23 bp, Artificial Sequence
  human ApoB siRNA sequence
aggcatctccacctcagcagcct

SEQ ID NO: 12250 - DNA, 23 bp, Artificial Sequence
  human ApoB siRNA sequence
ggcatctccacctcagcagcctc

SEQ ID NO: 12251 - DNA, 23 bp, Artificial Sequence
  human ApoB siRNA sequence
gcatctccacctcagcagcctcc

SEQ ID NO: 12252 - DNA, 23 bp, Artificial Sequence
  human ApoB siRNA sequence
catctccacctcagcagcctccc

SEQ ID NO: 12253 - DNA, 23 bp, Artificial Sequence
  human ApoB siRNA sequence
atctccacctcagcagcctcccc

SEQ ID NO: 12254 - DNA, 23 bp, Artificial Sequence
  human ApoB siRNA sequence
tctccacctcagcagcctcccca

SEQ ID NO: 12255 - DNA, 23 bp, Artificial Sequence
  human ApoB siRNA sequence
ctccacctcagcagcctccccag

SEQ ID NO: 12256 - DNA, 23 bp, Artificial Sequence
  human ApoB siRNA sequence
tccacctcagcagcctccccagc

SEQ ID NO: 12257 - DNA, 23 bp, Artificial Sequence
  human ApoB siRNA sequence
ccacctcagcagcctccccagcc

SEQ ID NO: 12258 - DNA, 23 bp, Artificial Sequence
  human ApoB siRNA sequence
cacctcagcagcctccccagccg

SEQ ID NO: 12259 - DNA, 23 bp, Artificial Sequence
  human ApoB siRNA sequence
acctcagcagcctccccagccgt

SEQ ID NO: 12260 - DNA, 23 bp, Artificial Sequence
  human ApoB siRNA sequence
cctcagcagcctccccagccgta

SEQ ID NO: 12261 - DNA, 23 bp, Artificial Sequence
  human ApoB siRNA sequence
ctcagcagcctccccagccgtag

SEQ ID NO: 12262 - DNA, 23 bp, Artificial Sequence
  human ApoB siRNA sequence
tcagcagcctccccagccgtagg

SEQ ID NO: 12263 - DNA, 23 bp, Artificial Sequence
  human ApoB siRNA sequence
cagcagcctccccagccgtaggc

SEQ ID NO: 12264 - DNA, 23 bp, Artificial Sequence
  human ApoB siRNA sequence
agcagcctccccagccgtaggca

SEQ ID NO: 12265 - DNA, 23 bp, Artificial Sequence
  human ApoB siRNA sequence
gcagcctccccagccgtaggcac

SEQ ID NO: 12266 - DNA, 23 bp, Artificial Sequence
  human ApoB siRNA sequence
cagcctccccagccgtaggcacc

SEQ ID NO: 12267 - DNA, 23 bp, Artificial Sequence
  human ApoB siRNA sequence
agcctccccagccgtaggcaccg

SEQ ID NO: 12268 - DNA, 23 bp, Artificial Sequence
  human ApoB siRNA sequence
gcctccccagccgtaggcaccgt

SEQ ID NO: 12269 - DNA, 23 bp, Artificial Sequence
  human ApoB siRNA sequence
cctccccagccgtaggcaccgtg

SEQ ID NO: 12270 - DNA, 23 bp, Artificial Sequence
  human ApoB siRNA sequence
ctccccagccgtaggcaccgtgg

SEQ ID NO: 12271 - DNA, 23 bp, Artificial Sequence
  human ApoB siRNA sequence
tccccagccgtaggcaccgtggg

SEQ ID NO: 12272 - DNA, 23 bp, Artificial Sequence
  human ApoB siRNA sequence
ccccagccgtaggcaccgtgggc

SEQ ID NO: 12273 - DNA, 23 bp, Artificial Sequence
  human ApoB siRNA sequence
cccagccgtaggcaccgtgggca

SEQ ID NO: 12274 - DNA, 23 bp, Artificial Sequence
  human ApoB siRNA sequence
ccagccgtaggcaccgtgggcat

SEQ ID NO: 12275 - DNA, 23 bp, Artificial Sequence
  human ApoB siRNA sequence
cagccgtaggcaccgtgggcatg

SEQ ID NO: 12276 - DNA, 23 bp, Artificial Sequence
  human ApoB siRNA sequence
agccgtaggcaccgtgggcatgg

SEQ ID NO: 12277 - DNA, 23 bp, Artificial Sequence
  human ApoB siRNA sequence
gccgtaggcaccgtgggcatgga

SEQ ID NO: 12278 - DNA, 23 bp, Artificial Sequence
  human ApoB siRNA sequence
ccgtaggcaccgtgggcatggat

SEQ ID NO: 12279 - DNA, 23 bp, Artificial Sequence
  human ApoB siRNA sequence
cgtaggcaccgtgggcatggata

SEQ ID NO: 12280 - DNA, 23 bp, Artificial Sequence
  human ApoB siRNA sequence
gtaggcaccgtgggcatggatat

SEQ ID NO: 12281 - DNA, 23 bp, Artificial Sequence
  human ApoB siRNA sequence
taggcaccgtgggcatggatatg

SEQ ID NO: 12282 - DNA, 23 bp, Artificial Sequence
  human ApoB siRNA sequence
aggcaccgtgggcatggatatgg

SEQ ID NO: 12283 - DNA, 23 bp, Artificial Sequence
  human ApoB siRNA sequence
ggcaccgtgggcatggatatgga

SEQ ID NO: 12284 - DNA, 23 bp, Artificial Sequence
  human ApoB siRNA sequence
gcaccgtgggcatggatatggat

SEQ ID NO: 12285 - DNA, 23 bp, Artificial Sequence
  human ApoB siRNA sequence
caccgtgggcatggatatggatg

SEQ ID NO: 12286 - DNA, 23 bp, Artificial Sequence
  human ApoB siRNA sequence
accgtgggcatggatatggatga

SEQ ID NO: 12287 - DNA, 23 bp, Artificial Sequence
  human ApoB siRNA sequence
ccgtgggcatggatatggatgaa

SEQ ID NO: 12288 - DNA, 23 bp, Artificial Sequence
  human ApoB siRNA sequence
cgtgggcatggatatggatgaag

SEQ ID NO: 12289 - DNA, 23 bp, Artificial Sequence
  human ApoB siRNA sequence
gtgggcatggatatggatgaaga

SEQ ID NO: 12290 - DNA, 23 bp, Artificial Sequence
  human ApoB siRNA sequence
tgggcatggatatggatgaagat

SEQ ID NO: 12291 - DNA, 23 bp, Artificial Sequence
  human ApoB siRNA sequence
gggcatggatatggatgaagatg

SEQ ID NO: 12292 - DNA, 23 bp, Artificial Sequence
  human ApoB siRNA sequence
ggcatggatatggatgaagatga

SEQ ID NO: 12293 - DNA, 23 bp, Artificial Sequence
  human ApoB siRNA sequence
gcatggatatggatgaagatgac

SEQ ID NO: 12294 - DNA, 23 bp, Artificial Sequence
  human ApoB siRNA sequence
catggatatggatgaagatgacg

SEQ ID NO: 12295 - DNA, 23 bp, Artificial Sequence
  human ApoB siRNA sequence
atggatatggatgaagatgacga

SEQ ID NO: 12296 - DNA, 23 bp, Artificial Sequence
  human ApoB siRNA sequence
tggatatggatgaagatgacgac

SEQ ID NO: 12297 - DNA, 23 bp, Artificial Sequence
  human ApoB siRNA sequence
ggatatggatgaagatgacgact

SEQ ID NO: 12298 - DNA, 23 bp, Artificial Sequence
  human ApoB siRNA sequence
gatatggatgaagatgacgactt

SEQ ID NO: 12299 - DNA, 23 bp, Artificial Sequence
  human ApoB siRNA sequence
atatggatgaagatgacgacttt

SEQ ID NO: 12300 - DNA, 23 bp, Artificial Sequence
  human ApoB siRNA sequence
tatggatgaagatgacgactttt

SEQ ID NO: 12301 - DNA, 23 bp, Artificial Sequence
  human ApoB siRNA sequence
atggatgaagatgacgacttttc

SEQ ID NO: 12302 - DNA, 23 bp, Artificial Sequence
  human ApoB siRNA sequence
tggatgaagatgacgacttttct

SEQ ID NO: 12303 - DNA, 23 bp, Artificial Sequence
  human ApoB siRNA sequence
ggatgaagatgacgacttttcta

SEQ ID NO: 12304 - DNA, 23 bp, Artificial Sequence
  human ApoB siRNA sequence
gatgaagatgacgacttttctaa

SEQ ID NO: 12305 - DNA, 23 bp, Artificial Sequence
  human ApoB siRNA sequence
atgaagatgacgacttttctaaa

SEQ ID NO: 12306 - DNA, 23 bp, Artificial Sequence
  human ApoB siRNA sequence
tgaagatgacgacttttctaaat

SEQ ID NO: 12307 - DNA, 23 bp, Artificial Sequence
  human ApoB siRNA sequence
gaagatgacgacttttctaaatg

SEQ ID NO: 12308 - DNA, 23 bp, Artificial Sequence
  human ApoB siRNA sequence
aagatgacgacttttctaaatgg

SEQ ID NO: 12309 - DNA, 23 bp, Artificial Sequence
  human ApoB siRNA sequence
agatgacgacttttctaaatgga

SEQ ID NO: 12310 - DNA, 23 bp, Artificial Sequence
  human ApoB siRNA sequence
gatgacgacttttctaaatggaa

SEQ ID NO: 12311 - DNA, 23 bp, Artificial Sequence
  human ApoB siRNA sequence
atgacgacttttctaaatggaac

SEQ ID NO: 12312 - DNA, 23 bp, Artificial Sequence
  human ApoB siRNA sequence
tgacgacttttctaaatggaact

SEQ ID NO: 12313 - DNA, 23 bp, Artificial Sequence
  human ApoB siRNA sequence
gacgacttttctaaatggaactt

SEQ ID NO: 12314 - DNA, 23 bp, Artificial Sequence
  human ApoB siRNA sequence
acgacttttctaaatggaacttc

SEQ ID NO: 12315 - DNA, 23 bp, Artificial Sequence
  human ApoB siRNA sequence
cgacttttctaaatggaacttct

SEQ ID NO: 12316 - DNA, 23 bp, Artificial Sequence
  human ApoB siRNA sequence
gacttttctaaatggaacttcta

SEQ ID NO: 12317 - DNA, 23 bp, Artificial Sequence
  human ApoB siRNA sequence
acttttctaaatggaacttctac

SEQ ID NO: 12318 - DNA, 23 bp, Artificial Sequence
  human ApoB siRNA sequence
cttttctaaatggaacttctact

SEQ ID NO: 12319 - DNA, 23 bp, Artificial Sequence
  human ApoB siRNA sequence
ttttctaaatggaacttctacta

SEQ ID NO: 12320 - DNA, 23 bp, Artificial Sequence
  human ApoB siRNA sequence
tttctaaatggaacttctactac

SEQ ID NO: 12321 - DNA, 23 bp, Artificial Sequence
  human ApoB siRNA sequence
ttctaaatggaacttctactaca

SEQ ID NO: 12322 - DNA, 23 bp, Artificial Sequence
  human ApoB siRNA sequence
tctaaatggaacttctactacag

SEQ ID NO: 12323 - DNA, 23 bp, Artificial Sequence
  human ApoB siRNA sequence
ctaaatggaacttctactacagc

SEQ ID NO: 12324 - DNA, 23 bp, Artificial Sequence
  human ApoB siRNA sequence
taaatggaacttctactacagcc

SEQ ID NO: 12325 - DNA, 23 bp, Artificial Sequence
  human ApoB siRNA sequence
aaatggaacttctactacagccc

SEQ ID NO: 12326 - DNA, 23 bp, Artificial Sequence
  human ApoB siRNA sequence
aatggaacttctactacagccct

SEQ ID NO: 12327 - DNA, 23 bp, Artificial Sequence
  human ApoB siRNA sequence
atggaacttctactacagccctc

SEQ ID NO: 12328 - DNA, 23 bp, Artificial Sequence
  human ApoB siRNA sequence
tggaacttctactacagccctca

SEQ ID NO: 12329 - DNA, 23 bp, Artificial Sequence
  human ApoB siRNA sequence
ggaacttctactacagccctcag

SEQ ID NO: 12330 - DNA, 23 bp, Artificial Sequence
  human ApoB siRNA sequence
gaacttctactacagccctcagt

SEQ ID NO: 12331 - DNA, 23 bp, Artificial Sequence
  human ApoB siRNA sequence
aacttctactacagccctcagtc

SEQ ID NO: 12332 - DNA, 23 bp, Artificial Sequence
  human ApoB siRNA sequence
acttctactacagccctcagtcc

SEQ ID NO: 12333 - DNA, 23 bp, Artificial Sequence
  human ApoB siRNA sequence
cttctactacagccctcagtcct

SEQ ID NO: 12334 - DNA, 23 bp, Artificial Sequence
  human ApoB siRNA sequence
ttctactacagccctcagtcctc

SEQ ID NO: 12335 - DNA, 23 bp, Artificial Sequence
  human ApoB siRNA sequence
tctactacagccctcagtcctct

SEQ ID NO: 12336 - DNA, 23 bp, Artificial Sequence
  human ApoB siRNA sequence
ctactacagccctcagtcctctc

SEQ ID NO: 12337 - DNA, 23 bp, Artificial Sequence
  human ApoB siRNA sequence
tactacagccctcagtcctctcc

SEQ ID NO: 12338 - DNA, 23 bp, Artificial Sequence
  human ApoB siRNA sequence
actacagccctcagtcctctcca

SEQ ID NO: 12339 - DNA, 23 bp, Artificial Sequence
  human ApoB siRNA sequence
ctacagccctcagtcctctccag

SEQ ID NO: 12340 - DNA, 23 bp, Artificial Sequence
  human ApoB siRNA sequence
tacagccctcagtcctctccaga

SEQ ID NO: 12341 - DNA, 23 bp, Artificial Sequence
  human ApoB siRNA sequence
acagccctcagtcctctccagat

SEQ ID NO: 12342 - DNA, 23 bp, Artificial Sequence
  human ApoB siRNA sequence
cagccctcagtcctctccagata

SEQ ID NO: 12343 - DNA, 23 bp, Artificial Sequence
  human ApoB siRNA sequence
agccctcagtcctctccagataa

SEQ ID NO: 12344 - DNA, 23 bp, Artificial Sequence
  human ApoB siRNA sequence
gccctcagtcctctccagataaa

SEQ ID NO: 12345 - DNA, 23 bp, Artificial Sequence
  human ApoB siRNA sequence
ccctcagtcctctccagataaaa

SEQ ID NO: 12346 - DNA, 23 bp, Artificial Sequence
  human ApoB siRNA sequence
cctcagtcctctccagataaaaa

SEQ ID NO: 12347 - DNA, 23 bp, Artificial Sequence
  human ApoB siRNA sequence
ctcagtcctctccagataaaaaa

SEQ ID NO: 12348 - DNA, 23 bp, Artificial Sequence
  human ApoB siRNA sequence
tcagtcctctccagataaaaaac

SEQ ID NO: 12349 - DNA, 23 bp, Artificial Sequence
  human ApoB siRNA sequence
cagtcctctccagataaaaaact

SEQ ID NO: 12350 - DNA, 23 bp, Artificial Sequence
  human ApoB siRNA sequence
agtcctctccagataaaaaactc

SEQ ID NO: 12351 - DNA, 23 bp, Artificial Sequence
  human ApoB siRNA sequence
gtcctctccagataaaaaactca

SEQ ID NO: 12352 - DNA, 23 bp, Artificial Sequence
  human ApoB siRNA sequence
tcctctccagataaaaaactcac

SEQ ID NO: 12353 - DNA, 23 bp, Artificial Sequence
  human ApoB siRNA sequence
cctctccagataaaaaactcacc

SEQ ID NO: 12354 - DNA, 23 bp, Artificial Sequence
  human ApoB siRNA sequence
ctctccagataaaaaactcacca

SEQ ID NO: 12355 - DNA, 23 bp, Artificial Sequence
  human ApoB siRNA sequence
tctccagataaaaaactcaccat

SEQ ID NO: 12356 - DNA, 23 bp, Artificial Sequence
  human ApoB siRNA sequence
ctccagataaaaaactcaccata

SEQ ID NO: 12357 - DNA, 23 bp, Artificial Sequence
  human ApoB siRNA sequence
tccagataaaaaactcaccatat

SEQ ID NO: 12358 - DNA, 23 bp, Artificial Sequence
  human ApoB siRNA sequence
ccagataaaaaactcaccatatt

SEQ ID NO: 12359 - DNA, 23 bp, Artificial Sequence
  human ApoB siRNA sequence
cagataaaaaactcaccatattc

SEQ ID NO: 12360 - DNA, 23 bp, Artificial Sequence
  human ApoB siRNA sequence
agataaaaaactcaccatattca

SEQ ID NO: 12361 - DNA, 23 bp, Artificial Sequence
  human ApoB siRNA sequence
gataaaaaactcaccatattcaa

SEQ ID NO: 12362 - DNA, 23 bp, Artificial Sequence
  human ApoB siRNA sequence
ataaaaaactcaccatattcaaa

SEQ ID NO: 12363 - DNA, 23 bp, Artificial Sequence
  human ApoB siRNA sequence
taaaaaactcaccatattcaaaa

SEQ ID NO: 12364 - DNA, 23 bp, Artificial Sequence
  human ApoB siRNA sequence
aaaaaactcaccatattcaaaac

SEQ ID NO: 12365 - DNA, 23 bp, Artificial Sequence
  human ApoB siRNA sequence
aaaaactcaccatattcaaaact

SEQ ID NO: 12366 - DNA, 23 bp, Artificial Sequence
  human ApoB siRNA sequence
aaaactcaccatattcaaaactg

SEQ ID NO: 12367 - DNA, 23 bp, Artificial Sequence
  human ApoB siRNA sequence
aaactcaccatattcaaaactga

SEQ ID NO: 12368 - DNA, 23 bp, Artificial Sequence
  human ApoB siRNA sequence
aactcaccatattcaaaactgag

SEQ ID NO: 12369 - DNA, 23 bp, Artificial Sequence
  human ApoB siRNA sequence
actcaccatattcaaaactgagt

SEQ ID NO: 12370 - DNA, 23 bp, Artificial Sequence
  human ApoB siRNA sequence
ctcaccatattcaaaactgagtt

SEQ ID NO: 12371 - DNA, 23 bp, Artificial Sequence
  human ApoB siRNA sequence
tcaccatattcaaaactgagttg

SEQ ID NO: 12372 - DNA, 23 bp, Artificial Sequence
  human ApoB siRNA sequence
caccatattcaaaactgagttga

SEQ ID NO: 12373 - DNA, 23 bp, Artificial Sequence
  human ApoB siRNA sequence
accatattcaaaactgagttgag

SEQ ID NO: 12374 - DNA, 23 bp, Artificial Sequence
  human ApoB siRNA sequence
ccatattcaaaactgagttgagg

SEQ ID NO: 12375 - DNA, 23 bp, Artificial Sequence
  human ApoB siRNA sequence
catattcaaaactgagttgaggg

SEQ ID NO: 12376 - DNA, 23 bp, Artificial Sequence
  human ApoB siRNA sequence
atattcaaaactgagttgagggt

SEQ ID NO: 12377 - DNA, 23 bp, Artificial Sequence
  human ApoB siRNA sequence
tattcaaaactgagttgagggtc

SEQ ID NO: 12378 - DNA, 23 bp, Artificial Sequence
  human ApoB siRNA sequence
attcaaaactgagttgagggtcc

SEQ ID NO: 12379 - DNA, 23 bp, Artificial Sequence
  human ApoB siRNA sequence
ttcaaaactgagttgagggtccg

SEQ ID NO: 12380 - DNA, 23 bp, Artificial Sequence
  human ApoB siRNA sequence
tcaaaactgagttgagggtccgg

SEQ ID NO: 12381 - DNA, 23 bp, Artificial Sequence
  human ApoB siRNA sequence
caaaactgagttgagggtccggg

SEQ ID NO: 12382 - DNA, 23 bp, Artificial Sequence
  human ApoB siRNA sequence
aaaactgagttgagggtccggga

SEQ ID NO: 12383 - DNA, 23 bp, Artificial Sequence
  human ApoB siRNA sequence
aaactgagttgagggtccgggaa

SEQ ID NO: 12384 - DNA, 23 bp, Artificial Sequence
  human ApoB siRNA sequence
aactgagttgagggtccgggaat

SEQ ID NO: 12385 - DNA, 23 bp, Artificial Sequence
  human ApoB siRNA sequence
actgagttgagggtccgggaatc

SEQ ID NO: 12386 - DNA, 23 bp, Artificial Sequence
  human ApoB siRNA sequence
ctgagttgagggtccgggaatct

SEQ ID NO: 12387 - DNA, 23 bp, Artificial Sequence
  human ApoB siRNA sequence
tgagttgagggtccgggaatctg

SEQ ID NO: 12388 - DNA, 23 bp, Artificial Sequence
  human ApoB siRNA sequence
gagttgagggtccgggaatctga

SEQ ID NO: 12389 - DNA, 23 bp, Artificial Sequence
  human ApoB siRNA sequence
agttgagggtccgggaatctgat

SEQ ID NO: 12390 - DNA, 23 bp, Artificial Sequence
  human ApoB siRNA sequence
gttgagggtccgggaatctgatg

SEQ ID NO: 12391 - DNA, 23 bp, Artificial Sequence
  human ApoB siRNA sequence
ttgagggtccgggaatctgatga

SEQ ID NO: 12392 - DNA, 23 bp, Artificial Sequence
  human ApoB siRNA sequence
tgagggtccgggaatctgatgag

SEQ ID NO: 12393 - DNA, 23 bp, Artificial Sequence
  human ApoB siRNA sequence
gagggtccgggaatctgatgagg

SEQ ID NO: 12394 - DNA, 23 bp, Artificial Sequence
  human ApoB siRNA sequence
agggtccgggaatctgatgagga

SEQ ID NO: 12395 - DNA, 23 bp, Artificial Sequence
  human ApoB siRNA sequence
gggtccgggaatctgatgaggaa

SEQ ID NO: 12396 - DNA, 23 bp, Artificial Sequence
  human ApoB siRNA sequence
ggtccgggaatctgatgaggaaa

SEQ ID NO: 12397 - DNA, 23 bp, Artificial Sequence
  human ApoB siRNA sequence
gtccgggaatctgatgaggaaac

SEQ ID NO: 12398 - DNA, 23 bp, Artificial Sequence
  human ApoB siRNA sequence
tccgggaatctgatgaggaaact

SEQ ID NO: 12399 - DNA, 23 bp, Artificial Sequence
  human ApoB siRNA sequence
ccgggaatctgatgaggaaactc

SEQ ID NO: 12400 - DNA, 23 bp, Artificial Sequence
  human ApoB siRNA sequence
cgggaatctgatgaggaaactca

SEQ ID NO: 12401 - DNA, 23 bp, Artificial Sequence
  human ApoB siRNA sequence
gggaatctgatgaggaaactcag

SEQ ID NO: 12402 - DNA, 23 bp, Artificial Sequence
  human ApoB siRNA sequence
ggaatctgatgaggaaactcaga

SEQ ID NO: 12403 - DNA, 23 bp, Artificial Sequence
  human ApoB siRNA sequence
gaatctgatgaggaaactcagat

SEQ ID NO: 12404 - DNA, 23 bp, Artificial Sequence
  human ApoB siRNA sequence
aatctgatgaggaaactcagatc

SEQ ID NO: 12405 - DNA, 23 bp, Artificial Sequence
  human ApoB siRNA sequence
atctgatgaggaaactcagatca

SEQ ID NO: 12406 - DNA, 23 bp, Artificial Sequence
  human ApoB siRNA sequence
tctgatgaggaaactcagatcaa

SEQ ID NO: 12407 - DNA, 23 bp, Artificial Sequence
  human ApoB siRNA sequence
ctgatgaggaaactcagatcaaa

SEQ ID NO: 12408 - DNA, 23 bp, Artificial Sequence
  human ApoB siRNA sequence
tgatgaggaaactcagatcaaag

SEQ ID NO: 12409 - DNA, 23 bp, Artificial Sequence
  human ApoB siRNA sequence
gatgaggaaactcagatcaaagt

SEQ ID NO: 12410 - DNA, 23 bp, Artificial Sequence
  human ApoB siRNA sequence
atgaggaaactcagatcaaagtt

SEQ ID NO: 12411 - DNA, 23 bp, Artificial Sequence
  human ApoB siRNA sequence
tgaggaaactcagatcaaagtta

SEQ ID NO: 12412 - DNA, 23 bp, Artificial Sequence
  human ApoB siRNA sequence
gaggaaactcagatcaaagttaa

SEQ ID NO: 12413 - DNA, 23 bp, Artificial Sequence
  human ApoB siRNA sequence
aggaaactcagatcaaagttaat

SEQ ID NO: 12414 - DNA, 23 bp, Artificial Sequence
  human ApoB siRNA sequence
ggaaactcagatcaaagttaatt

SEQ ID NO: 12415 - DNA, 23 bp, Artificial Sequence
  human ApoB siRNA sequence
gaaactcagatcaaagttaattg

SEQ ID NO: 12416 - DNA, 23 bp, Artificial Sequence
  human ApoB siRNA sequence
aaactcagatcaaagttaattgg

SEQ ID NO: 12417 - DNA, 23 bp, Artificial Sequence
  human ApoB siRNA sequence
aactcagatcaaagttaattggg

SEQ ID NO: 12418 - DNA, 23 bp, Artificial Sequence
  human ApoB siRNA sequence
actcagatcaaagttaattggga

SEQ ID NO: 12419 - DNA, 23 bp, Artificial Sequence
  human ApoB siRNA sequence
ctcagatcaaagttaattgggaa

SEQ ID NO: 12420 - DNA, 23 bp, Artificial Sequence
  human ApoB siRNA sequence
tcagatcaaagttaattgggaag

SEQ ID NO: 12421 - DNA, 23 bp, Artificial Sequence
  human ApoB siRNA sequence
cagatcaaagttaattgggaaga

SEQ ID NO: 12422 - DNA, 23 bp, Artificial Sequence
  human ApoB siRNA sequence
agatcaaagttaattgggaagaa

SEQ ID NO: 12423 - DNA, 23 bp, Artificial Sequence
  human ApoB siRNA sequence
gatcaaagttaattgggaagaag

SEQ ID NO: 12424 - DNA, 23 bp, Artificial Sequence
  human ApoB siRNA sequence
atcaaagttaattgggaagaaga

SEQ ID NO: 12425 - DNA, 23 bp, Artificial Sequence
  human ApoB siRNA sequence
tcaaagttaattgggaagaagag

SEQ ID NO: 12426 - DNA, 23 bp, Artificial Sequence
  human ApoB siRNA sequence
caaagttaattgggaagaagagg

SEQ ID NO: 12427 - DNA, 23 bp, Artificial Sequence
  human ApoB siRNA sequence
aaagttaattgggaagaagaggc

SEQ ID NO: 12428 - DNA, 23 bp, Artificial Sequence
  human ApoB siRNA sequence
aagttaattgggaagaagaggca

SEQ ID NO: 12429 - DNA, 23 bp, Artificial Sequence
  human ApoB siRNA sequence
agttaattgggaagaagaggcag

SEQ ID NO: 12430 - DNA, 23 bp, Artificial Sequence
  human ApoB siRNA sequence
gttaattgggaagaagaggcagc

SEQ ID NO: 12431 - DNA, 23 bp, Artificial Sequence
  human ApoB siRNA sequence
ttaattgggaagaagaggcagct

SEQ ID NO: 12432 - DNA, 23 bp, Artificial Sequence
  human ApoB siRNA sequence
taattgggaagaagaggcagctt

SEQ ID NO: 12433 - DNA, 23 bp, Artificial Sequence
  human ApoB siRNA sequence
aattgggaagaagaggcagcttc

SEQ ID NO: 12434 - DNA, 23 bp, Artificial Sequence
  human ApoB siRNA sequence
attgggaagaagaggcagcttct

SEQ ID NO: 12435 - DNA, 23 bp, Artificial Sequence
  human ApoB siRNA sequence
ttgggaagaagaggcagcttctg

SEQ ID NO: 12436 - DNA, 23 bp, Artificial Sequence
  human ApoB siRNA sequence
tgggaagaagaggcagcttctgg

SEQ ID NO: 12437 - DNA, 23 bp, Artificial Sequence
  human ApoB siRNA sequence
gggaagaagaggcagcttctggc

SEQ ID NO: 12438 - DNA, 23 bp, Artificial Sequence
  human ApoB siRNA sequence
ggaagaagaggcagcttctggct

SEQ ID NO: 12439 - DNA, 23 bp, Artificial Sequence
  human ApoB siRNA sequence
gaagaagaggcagcttctggctt

SEQ ID NO: 12440 - DNA, 23 bp, Artificial Sequence
  human ApoB siRNA sequence
aagaagaggcagcttctggcttg

SEQ ID NO: 12441 - DNA, 23 bp, Artificial Sequence
  human ApoB siRNA sequence
agaagaggcagcttctggcttgc

SEQ ID NO: 12442 - DNA, 23 bp, Artificial Sequence
  human ApoB siRNA sequence
gaagaggcagcttctggcttgct

SEQ ID NO: 12443 - DNA, 23 bp, Artificial Sequence
  human ApoB siRNA sequence
aagaggcagcttctggcttgcta

SEQ ID NO: 12444 - DNA, 23 bp, Artificial Sequence
  human ApoB siRNA sequence
agaggcagcttctggcttgctaa

SEQ ID NO: 12445 - DNA, 23 bp, Artificial Sequence
  human ApoB siRNA sequence
gaggcagcttctggcttgctaac

SEQ ID NO: 12446 - DNA, 23 bp, Artificial Sequence
  human ApoB siRNA sequence
aggcagcttctggcttgctaacc

SEQ ID NO: 12447 - DNA, 23 bp, Artificial Sequence
  human ApoB siRNA sequence
ggcagcttctggcttgctaacct

SEQ ID NO: 12448 - DNA, 23 bp, Artificial Sequence
  human ApoB siRNA sequence
gcagcttctggcttgctaacctc

SEQ ID NO: 12449 - DNA, 23 bp, Artificial Sequence
  human ApoB siRNA sequence
cagcttctggcttgctaacctct

SEQ ID NO: 12450 - DNA, 23 bp, Artificial Sequence
  human ApoB siRNA sequence
agcttctggcttgctaacctctc

SEQ ID NO: 12451 - DNA, 23 bp, Artificial Sequence
  human ApoB siRNA sequence
gcttctggcttgctaacctctct

SEQ ID NO: 12452 - DNA, 23 bp, Artificial Sequence
  human ApoB siRNA sequence
cttctggcttgctaacctctctg

SEQ ID NO: 12453 - DNA, 23 bp, Artificial Sequence
  human ApoB siRNA sequence
ttctggcttgctaacctctctga

SEQ ID NO: 12454 - DNA, 23 bp, Artificial Sequence
  human ApoB siRNA sequence
tctggcttgctaacctctctgaa

SEQ ID NO: 12455 - DNA, 23 bp, Artificial Sequence
  human ApoB siRNA sequence
ctggcttgctaacctctctgaaa

SEQ ID NO: 12456 - DNA, 23 bp, Artificial Sequence
  human ApoB siRNA sequence
tggcttgctaacctctctgaaag

SEQ ID NO: 12457 - DNA, 23 bp, Artificial Sequence
  human ApoB siRNA sequence
ggcttgctaacctctctgaaaga

SEQ ID NO: 12458 - DNA, 23 bp, Artificial Sequence
  human ApoB siRNA sequence
gcttgctaacctctctgaaagac

SEQ ID NO: 12459 - DNA, 23 bp, Artificial Sequence
  human ApoB siRNA sequence
cttgctaacctctctgaaagaca

SEQ ID NO: 12460 - DNA, 23 bp, Artificial Sequence
  human ApoB siRNA sequence
ttgctaacctctctgaaagacaa

SEQ ID NO: 12461 - DNA, 23 bp, Artificial Sequence
  human ApoB siRNA sequence
tgctaacctctctgaaagacaac

SEQ ID NO: 12462 - DNA, 23 bp, Artificial Sequence
  human ApoB siRNA sequence
gctaacctctctgaaagacaacg

SEQ ID NO: 12463 - DNA, 23 bp, Artificial Sequence
  human ApoB siRNA sequence
ctaacctctctgaaagacaacgt

SEQ ID NO: 12464 - DNA, 23 bp, Artificial Sequence
  human ApoB siRNA sequence
taacctctctgaaagacaacgtg

SEQ ID NO: 12465 - DNA, 23 bp, Artificial Sequence
  human ApoB siRNA sequence
aacctctctgaaagacaacgtgc

SEQ ID NO: 12466 - DNA, 23 bp, Artificial Sequence
  human ApoB siRNA sequence
acctctctgaaagacaacgtgcc

SEQ ID NO: 12467 - DNA, 23 bp, Artificial Sequence
  human ApoB siRNA sequence
cctctctgaaagacaacgtgccc

SEQ ID NO: 12468 - DNA, 23 bp, Artificial Sequence
  human ApoB siRNA sequence
ctctctgaaagacaacgtgccca

SEQ ID NO: 12469 - DNA, 23 bp, Artificial Sequence
  human ApoB siRNA sequence
tctctgaaagacaacgtgcccaa

SEQ ID NO: 12470 - DNA, 23 bp, Artificial Sequence
  human ApoB siRNA sequence
ctctgaaagacaacgtgcccaag

SEQ ID NO: 12471 - DNA, 23 bp, Artificial Sequence
  human ApoB siRNA sequence
tctgaaagacaacgtgcccaagg

SEQ ID NO: 12472 - DNA, 23 bp, Artificial Sequence
  human ApoB siRNA sequence
ctgaaagacaacgtgcccaaggc

SEQ ID NO: 12473 - DNA, 23 bp, Artificial Sequence
  human ApoB siRNA sequence
tgaaagacaacgtgcccaaggcc

SEQ ID NO: 12474 - DNA, 23 bp, Artificial Sequence
  human ApoB siRNA sequence
gaaagacaacgtgcccaaggcca

SEQ ID NO: 12475 - DNA, 23 bp, Artificial Sequence
  human ApoB siRNA sequence
aaagacaacgtgcccaaggccac

SEQ ID NO: 12476 - DNA, 23 bp, Artificial Sequence
  human ApoB siRNA sequence
aagacaacgtgcccaaggccaca

SEQ ID NO: 12477 - DNA, 23 bp, Artificial Sequence
  human ApoB siRNA sequence
agacaacgtgcccaaggccacag

SEQ ID NO: 12478 - DNA, 23 bp, Artificial Sequence
  human ApoB siRNA sequence
gacaacgtgcccaaggccacagg

SEQ ID NO: 12479 - DNA, 23 bp, Artificial Sequence
  human ApoB siRNA sequence
acaacgtgcccaaggccacaggg

SEQ ID NO: 12480 - DNA, 23 bp, Artificial Sequence
  human ApoB siRNA sequence
caacgtgcccaaggccacagggg

SEQ ID NO: 12481 - DNA, 23 bp, Artificial Sequence
  human ApoB siRNA sequence
aacgtgcccaaggccacaggggt

SEQ ID NO: 12482 - DNA, 23 bp, Artificial Sequence
  human ApoB siRNA sequence
acgtgcccaaggccacaggggtc

SEQ ID NO: 12483 - DNA, 23 bp, Artificial Sequence
  human ApoB siRNA sequence
cgtgcccaaggccacaggggtcc

SEQ ID NO: 12484 - DNA, 23 bp, Artificial Sequence
  human ApoB siRNA sequence
gtgcccaaggccacaggggtcct

SEQ ID NO: 12485 - DNA, 23 bp, Artificial Sequence
  human ApoB siRNA sequence
tgcccaaggccacaggggtcctt

SEQ ID NO: 12486 - DNA, 23 bp, Artificial Sequence
  human ApoB siRNA sequence
gcccaaggccacaggggtccttt

SEQ ID NO: 12487 - DNA, 23 bp, Artificial Sequence
  human ApoB siRNA sequence
cccaaggccacaggggtccttta

SEQ ID NO: 12488 - DNA, 23 bp, Artificial Sequence
  human ApoB siRNA sequence
ccaaggccacaggggtcctttat

SEQ ID NO: 12489 - DNA, 23 bp, Artificial Sequence
  human ApoB siRNA sequence
caaggccacaggggtcctttatg

SEQ ID NO: 12490 - DNA, 23 bp, Artificial Sequence
  human ApoB siRNA sequence
aaggccacaggggtcctttatga

SEQ ID NO: 12491 - DNA, 23 bp, Artificial Sequence
  human ApoB siRNA sequence
aggccacaggggtcctttatgat

SEQ ID NO: 12492 - DNA, 23 bp, Artificial Sequence
  human ApoB siRNA sequence
ggccacaggggtcctttatgatt

SEQ ID NO: 12493 - DNA, 23 bp, Artificial Sequence
  human ApoB siRNA sequence
gccacaggggtcctttatgatta

SEQ ID NO: 12494 - DNA, 23 bp, Artificial Sequence
  human ApoB siRNA sequence
ccacaggggtcctttatgattat

SEQ ID NO: 12495 - DNA, 23 bp, Artificial Sequence
  human ApoB siRNA sequence
cacaggggtcctttatgattatg

SEQ ID NO: 12496 - DNA, 23 bp, Artificial Sequence
  human ApoB siRNA sequence
acaggggtcctttatgattatgt

SEQ ID NO: 12497 - DNA, 23 bp, Artificial Sequence
  human ApoB siRNA sequence
caggggtcctttatgattatgtc

SEQ ID NO: 12498 - DNA, 23 bp, Artificial Sequence
  human ApoB siRNA sequence
aggggtcctttatgattatgtca

SEQ ID NO: 12499 - DNA, 23 bp, Artificial Sequence
  human ApoB siRNA sequence
ggggtcctttatgattatgtcaa

SEQ ID NO: 12500 - DNA, 23 bp, Artificial Sequence
  human ApoB siRNA sequence
gggtcctttatgattatgtcaac

SEQ ID NO: 12501 - DNA, 23 bp, Artificial Sequence
  human ApoB siRNA sequence
ggtcctttatgattatgtcaaca

SEQ ID NO: 12502 - DNA, 23 bp, Artificial Sequence
  human ApoB siRNA sequence
gtcctttatgattatgtcaacaa

SEQ ID NO: 12503 - DNA, 23 bp, Artificial Sequence
  human ApoB siRNA sequence
tcctttatgattatgtcaacaag

SEQ ID NO: 12504 - DNA, 23 bp, Artificial Sequence
  human ApoB siRNA sequence
cctttatgattatgtcaacaagt

SEQ ID NO: 12505 - DNA, 23 bp, Artificial Sequence
  human ApoB siRNA sequence
ctttatgattatgtcaacaagta

SEQ ID NO: 12506 - DNA, 23 bp, Artificial Sequence
  human ApoB siRNA sequence
tttatgattatgtcaacaagtac

SEQ ID NO: 12507 - DNA, 23 bp, Artificial Sequence
  human ApoB siRNA sequence
ttatgattatgtcaacaagtacc

SEQ ID NO: 12508 - DNA, 23 bp, Artificial Sequence
  human ApoB siRNA sequence
tatgattatgtcaacaagtacca

SEQ ID NO: 12509 - DNA, 23 bp, Artificial Sequence
  human ApoB siRNA sequence
atgattatgtcaacaagtaccac

SEQ ID NO: 12510 - DNA, 23 bp, Artificial Sequence
  human ApoB siRNA sequence
tgattatgtcaacaagtaccact

SEQ ID NO: 12511 - DNA, 23 bp, Artificial Sequence
  human ApoB siRNA sequence
gattatgtcaacaagtaccactg

SEQ ID NO: 12512 - DNA, 23 bp, Artificial Sequence
  human ApoB siRNA sequence
attatgtcaacaagtaccactgg

SEQ ID NO: 12513 - DNA, 23 bp, Artificial Sequence
  human ApoB siRNA sequence
ttatgtcaacaagtaccactggg

SEQ ID NO: 12514 - DNA, 23 bp, Artificial Sequence
  human ApoB siRNA sequence
tatgtcaacaagtaccactggga

SEQ ID NO: 12515 - DNA, 23 bp, Artificial Sequence
  human ApoB siRNA sequence
atgtcaacaagtaccactgggaa

SEQ ID NO: 12516 - DNA, 23 bp, Artificial Sequence
  human ApoB siRNA sequence
tgtcaacaagtaccactgggaac

SEQ ID NO: 12517 - DNA, 23 bp, Artificial Sequence
  human ApoB siRNA sequence
gtcaacaagtaccactgggaaca

SEQ ID NO: 12518 - DNA, 23 bp, Artificial Sequence
  human ApoB siRNA sequence
tcaacaagtaccactgggaacac

SEQ ID NO: 12519 - DNA, 23 bp, Artificial Sequence
  human ApoB siRNA sequence
caacaagtaccactgggaacaca

SEQ ID NO: 12520 - DNA, 23 bp, Artificial Sequence
  human ApoB siRNA sequence
aacaagtaccactgggaacacac

SEQ ID NO: 12521 - DNA, 23 bp, Artificial Sequence
  human ApoB siRNA sequence
acaagtaccactgggaacacaca

SEQ ID NO: 12522 - DNA, 23 bp, Artificial Sequence
  human ApoB siRNA sequence
caagtaccactgggaacacacag

SEQ ID NO: 12523 - DNA, 23 bp, Artificial Sequence
  human ApoB siRNA sequence
aagtaccactgggaacacacagg

SEQ ID NO: 12524 - DNA, 23 bp, Artificial Sequence
  human ApoB siRNA sequence
agtaccactgggaacacacaggg

SEQ ID NO: 12525 - DNA, 23 bp, Artificial Sequence
  human ApoB siRNA sequence
gtaccactgggaacacacagggc

SEQ ID NO: 12526 - DNA, 23 bp, Artificial Sequence
  human ApoB siRNA sequence
taccactgggaacacacagggct

SEQ ID NO: 12527 - DNA, 23 bp, Artificial Sequence
  human ApoB siRNA sequence
accactgggaacacacagggctc

SEQ ID NO: 12528 - DNA, 23 bp, Artificial Sequence
  human ApoB siRNA sequence
ccactgggaacacacagggctca

SEQ ID NO: 12529 - DNA, 23 bp, Artificial Sequence
  human ApoB siRNA sequence
cactgggaacacacagggctcac

SEQ ID NO: 12530 - DNA, 23 bp, Artificial Sequence
  human ApoB siRNA sequence
actgggaacacacagggctcacc

SEQ ID NO: 12531 - DNA, 23 bp, Artificial Sequence
  human ApoB siRNA sequence
ctgggaacacacagggctcaccc

SEQ ID NO: 12532 - DNA, 23 bp, Artificial Sequence
  human ApoB siRNA sequence
tgggaacacacagggctcaccct

SEQ ID NO: 12533 - DNA, 23 bp, Artificial Sequence
  human ApoB siRNA sequence
gggaacacacagggctcaccctg

SEQ ID NO: 12534 - DNA, 23 bp, Artificial Sequence
  human ApoB siRNA sequence
ggaacacacagggctcaccctga

SEQ ID NO: 12535 - DNA, 23 bp, Artificial Sequence
  human ApoB siRNA sequence
gaacacacagggctcaccctgag

SEQ ID NO: 12536 - DNA, 23 bp, Artificial Sequence
  human ApoB siRNA sequence
aacacacagggctcaccctgaga

SEQ ID NO: 12537 - DNA, 23 bp, Artificial Sequence
  human ApoB siRNA sequence
acacacagggctcaccctgagag

SEQ ID NO: 12538 - DNA, 23 bp, Artificial Sequence
  human ApoB siRNA sequence
cacacagggctcaccctgagaga

SEQ ID NO: 12539 - DNA, 23 bp, Artificial Sequence
  human ApoB siRNA sequence
acacagggctcaccctgagagaa

SEQ ID NO: 12540 - DNA, 23 bp, Artificial Sequence
  human ApoB siRNA sequence
cacagggctcaccctgagagaag

SEQ ID NO: 12541 - DNA, 23 bp, Artificial Sequence
  human ApoB siRNA sequence
acagggctcaccctgagagaagt

SEQ ID NO: 12542 - DNA, 23 bp, Artificial Sequence
  human ApoB siRNA sequence
cagggctcaccctgagagaagtg

SEQ ID NO: 12543 - DNA, 23 bp, Artificial Sequence
  human ApoB siRNA sequence
agggctcaccctgagagaagtgt

SEQ ID NO: 12544 - DNA, 23 bp, Artificial Sequence
  human ApoB siRNA sequence
gggctcaccctgagagaagtgtc

SEQ ID NO: 12545 - DNA, 23 bp, Artificial Sequence
  human ApoB siRNA sequence
ggctcaccctgagagaagtgtct

SEQ ID NO: 12546 - DNA, 23 bp, Artificial Sequence
  human ApoB siRNA sequence
gctcaccctgagagaagtgtctt

SEQ ID NO: 12547 - DNA, 23 bp, Artificial Sequence
  human ApoB siRNA sequence
ctcaccctgagagaagtgtcttc

SEQ ID NO: 12548 - DNA, 23 bp, Artificial Sequence
  human ApoB siRNA sequence
tcaccctgagagaagtgtcttca

SEQ ID NO: 12549 - DNA, 23 bp, Artificial Sequence
  human ApoB siRNA sequence
caccctgagagaagtgtcttcaa

SEQ ID NO: 12550 - DNA, 23 bp, Artificial Sequence
  human ApoB siRNA sequence
accctgagagaagtgtcttcaaa

SEQ ID NO: 12551 - DNA, 23 bp, Artificial Sequence
  human ApoB siRNA sequence
ccctgagagaagtgtcttcaaag

SEQ ID NO: 12552 - DNA, 23 bp, Artificial Sequence
  human ApoB siRNA sequence
cctgagagaagtgtcttcaaagc

SEQ ID NO: 12553 - DNA, 23 bp, Artificial Sequence
  human ApoB siRNA sequence
ctgagagaagtgtcttcaaagct

SEQ ID NO: 12554 - DNA, 23 bp, Artificial Sequence
  human ApoB siRNA sequence
tgagagaagtgtcttcaaagctg

SEQ ID NO: 12555 - DNA, 23 bp, Artificial Sequence
  human ApoB siRNA sequence
gagagaagtgtcttcaaagctga

SEQ ID NO: 12556 - DNA, 23 bp, Artificial Sequence
  human ApoB siRNA sequence
agagaagtgtcttcaaagctgag

SEQ ID NO: 12557 - DNA, 23 bp, Artificial Sequence
  human ApoB siRNA sequence
gagaagtgtcttcaaagctgaga

SEQ ID NO: 12558 - DNA, 23 bp, Artificial Sequence
  human ApoB siRNA sequence
agaagtgtcttcaaagctgagaa

SEQ ID NO: 12559 - DNA, 23 bp, Artificial Sequence
  human ApoB siRNA sequence
gaagtgtcttcaaagctgagaag

SEQ ID NO: 12560 - DNA, 23 bp, Artificial Sequence
  human ApoB siRNA sequence
aagtgtcttcaaagctgagaaga

SEQ ID NO: 12561 - DNA, 23 bp, Artificial Sequence
  human ApoB siRNA sequence
agtgtcttcaaagctgagaagaa

SEQ ID NO: 12562 - DNA, 23 bp, Artificial Sequence
  human ApoB siRNA sequence
gtgtcttcaaagctgagaagaaa

SEQ ID NO: 12563 - DNA, 23 bp, Artificial Sequence
  human ApoB siRNA sequence
tgtcttcaaagctgagaagaaat

SEQ ID NO: 12564 - DNA, 23 bp, Artificial Sequence
  human ApoB siRNA sequence
gtcttcaaagctgagaagaaatc

SEQ ID NO: 12565 - DNA, 23 bp, Artificial Sequence
  human ApoB siRNA sequence
tcttcaaagctgagaagaaatct

SEQ ID NO: 12566 - DNA, 23 bp, Artificial Sequence
  human ApoB siRNA sequence
cttcaaagctgagaagaaatctg

SEQ ID NO: 12567 - DNA, 23 bp, Artificial Sequence
  human ApoB siRNA sequence
ttcaaagctgagaagaaatctgc

SEQ ID NO: 12568 - DNA, 23 bp, Artificial Sequence
  human ApoB siRNA sequence
tcaaagctgagaagaaatctgca

SEQ ID NO: 12569 - DNA, 23 bp, Artificial Sequence
  human ApoB siRNA sequence
caaagctgagaagaaatctgcag

SEQ ID NO: 12570 - DNA, 23 bp, Artificial Sequence
  human ApoB siRNA sequence
aaagctgagaagaaatctgcaga

SEQ ID NO: 12571 - DNA, 23 bp, Artificial Sequence
  human ApoB siRNA sequence
aagctgagaagaaatctgcagaa

SEQ ID NO: 12572 - DNA, 23 bp, Artificial Sequence
  human ApoB siRNA sequence
agctgagaagaaatctgcagaac

SEQ ID NO: 12573 - DNA, 23 bp, Artificial Sequence
  human ApoB siRNA sequence
gctgagaagaaatctgcagaaca

SEQ ID NO: 12574 - DNA, 23 bp, Artificial Sequence
  human ApoB siRNA sequence
ctgagaagaaatctgcagaacaa

SEQ ID NO: 12575 - DNA, 23 bp, Artificial Sequence
  human ApoB siRNA sequence
tgagaagaaatctgcagaacaat

SEQ ID NO: 12576 - DNA, 23 bp, Artificial Sequence
  human ApoB siRNA sequence
gagaagaaatctgcagaacaatg

SEQ ID NO: 12577 - DNA, 23 bp, Artificial Sequence
  human ApoB siRNA sequence
agaagaaatctgcagaacaatgc

SEQ ID NO: 12578 - DNA, 23 bp, Artificial Sequence
  human ApoB siRNA sequence
gaagaaatctgcagaacaatgct

SEQ ID NO: 12579 - DNA, 23 bp, Artificial Sequence
  human ApoB siRNA sequence
aagaaatctgcagaacaatgctg

SEQ ID NO: 12580 - DNA, 23 bp, Artificial Sequence
  human ApoB siRNA sequence
agaaatctgcagaacaatgctga

SEQ ID NO: 12581 - DNA, 23 bp, Artificial Sequence
  human ApoB siRNA sequence
gaaatctgcagaacaatgctgag

SEQ ID NO: 12582 - DNA, 23 bp, Artificial Sequence
  human ApoB siRNA sequence
aaatctgcagaacaatgctgagt

SEQ ID NO: 12583 - DNA, 23 bp, Artificial Sequence
  human ApoB siRNA sequence
aatctgcagaacaatgctgagtg

SEQ ID NO: 12584 - DNA, 23 bp, Artificial Sequence
  human ApoB siRNA sequence
atctgcagaacaatgctgagtgg

SEQ ID NO: 12585 - DNA, 23 bp, Artificial Sequence
  human ApoB siRNA sequence
tctgcagaacaatgctgagtggg

SEQ ID NO: 12586 - DNA, 23 bp, Artificial Sequence
  human ApoB siRNA sequence
ctgcagaacaatgctgagtgggt

SEQ ID NO: 12587 - DNA, 23 bp, Artificial Sequence
  human ApoB siRNA sequence
tgcagaacaatgctgagtgggtt

SEQ ID NO: 12588 - DNA, 23 bp, Artificial Sequence
  human ApoB siRNA sequence
gcagaacaatgctgagtgggttt

SEQ ID NO: 12589 - DNA, 23 bp, Artificial Sequence
  human ApoB siRNA sequence
cagaacaatgctgagtgggttta

SEQ ID NO: 12590 - DNA, 23 bp, Artificial Sequence
  human ApoB siRNA sequence
agaacaatgctgagtgggtttat

SEQ ID NO: 12591 - DNA, 23 bp, Artificial Sequence
  human ApoB siRNA sequence
gaacaatgctgagtgggtttatc

SEQ ID NO: 12592 - DNA, 23 bp, Artificial Sequence
  human ApoB siRNA sequence
aacaatgctgagtgggtttatca

SEQ ID NO: 12593 - DNA, 23 bp, Artificial Sequence
  human ApoB siRNA sequence
acaatgctgagtgggtttatcaa

SEQ ID NO: 12594 - DNA, 23 bp, Artificial Sequence
  human ApoB siRNA sequence
caatgctgagtgggtttatcaag

SEQ ID NO: 12595 - DNA, 23 bp, Artificial Sequence
  human ApoB siRNA sequence
aatgctgagtgggtttatcaagg

SEQ ID NO: 12596 - DNA, 23 bp, Artificial Sequence
  human ApoB siRNA sequence
atgctgagtgggtttatcaaggg

SEQ ID NO: 12597 - DNA, 23 bp, Artificial Sequence
  human ApoB siRNA sequence
tgctgagtgggtttatcaagggg

SEQ ID NO: 12598 - DNA, 23 bp, Artificial Sequence
  human ApoB siRNA sequence
gctgagtgggtttatcaaggggc

SEQ ID NO: 12599 - DNA, 23 bp, Artificial Sequence
  human ApoB siRNA sequence
ctgagtgggtttatcaaggggcc

SEQ ID NO: 12600 - DNA, 23 bp, Artificial Sequence
  human ApoB siRNA sequence
tgagtgggtttatcaaggggcca

SEQ ID NO: 12601 - DNA, 23 bp, Artificial Sequence
  human ApoB siRNA sequence
gagtgggtttatcaaggggccat

SEQ ID NO: 12602 - DNA, 23 bp, Artificial Sequence
  human ApoB siRNA sequence
agtgggtttatcaaggggccatt

SEQ ID NO: 12603 - DNA, 23 bp, Artificial Sequence
  human ApoB siRNA sequence
gtgggtttatcaaggggccatta

SEQ ID NO: 12604 - DNA, 23 bp, Artificial Sequence
  human ApoB siRNA sequence
tgggtttatcaaggggccattag

SEQ ID NO: 12605 - DNA, 23 bp, Artificial Sequence
  human ApoB siRNA sequence
gggtttatcaaggggccattagg

SEQ ID NO: 12606 - DNA, 23 bp, Artificial Sequence
  human ApoB siRNA sequence
ggtttatcaaggggccattaggc

SEQ ID NO: 12607 - DNA, 23 bp, Artificial Sequence
  human ApoB siRNA sequence
gtttatcaaggggccattaggca

SEQ ID NO: 12608 - DNA, 23 bp, Artificial Sequence
  human ApoB siRNA sequence
tttatcaaggggccattaggcaa

SEQ ID NO: 12609 - DNA, 23 bp, Artificial Sequence
  human ApoB siRNA sequence
ttatcaaggggccattaggcaaa

SEQ ID NO: 12610 - DNA, 23 bp, Artificial Sequence
  human ApoB siRNA sequence
tatcaaggggccattaggcaaat

SEQ ID NO: 12611 - DNA, 23 bp, Artificial Sequence
  human ApoB siRNA sequence
atcaaggggccattaggcaaatt

SEQ ID NO: 12612 - DNA, 23 bp, Artificial Sequence
  human ApoB siRNA sequence
tcaaggggccattaggcaaattg

SEQ ID NO: 12613 - DNA, 23 bp, Artificial Sequence
  human ApoB siRNA sequence
caaggggccattaggcaaattga

SEQ ID NO: 12614 - DNA, 23 bp, Artificial Sequence
  human ApoB siRNA sequence
aaggggccattaggcaaattgat

SEQ ID NO: 12615 - DNA, 23 bp, Artificial Sequence
  human ApoB siRNA sequence
aggggccattaggcaaattgatg

SEQ ID NO: 12616 - DNA, 23 bp, Artificial Sequence
  human ApoB siRNA sequence
ggggccattaggcaaattgatga

SEQ ID NO: 12617 - DNA, 23 bp, Artificial Sequence
  human ApoB siRNA sequence
gggccattaggcaaattgatgat

SEQ ID NO: 12618 - DNA, 23 bp, Artificial Sequence
  human ApoB siRNA sequence
ggccattaggcaaattgatgata

SEQ ID NO: 12619 - DNA, 23 bp, Artificial Sequence
  human ApoB siRNA sequence
gccattaggcaaattgatgatat

SEQ ID NO: 12620 - DNA, 23 bp, Artificial Sequence
  human ApoB siRNA sequence
ccattaggcaaattgatgatatc

SEQ ID NO: 12621 - DNA, 23 bp, Artificial Sequence
  human ApoB siRNA sequence
cattaggcaaattgatgatatcg

SEQ ID NO: 12622 - DNA, 23 bp, Artificial Sequence
  human ApoB siRNA sequence
attaggcaaattgatgatatcga

SEQ ID NO: 12623 - DNA, 23 bp, Artificial Sequence
  human ApoB siRNA sequence
ttaggcaaattgatgatatcgac

SEQ ID NO: 12624 - DNA, 23 bp, Artificial Sequence
  human ApoB siRNA sequence
taggcaaattgatgatatcgacg

SEQ ID NO: 12625 - DNA, 23 bp, Artificial Sequence
  human ApoB siRNA sequence
aggcaaattgatgatatcgacgt

SEQ ID NO: 12626 - DNA, 23 bp, Artificial Sequence
  human ApoB siRNA sequence
ggcaaattgatgatatcgacgtg

SEQ ID NO: 12627 - DNA, 23 bp, Artificial Sequence
  human ApoB siRNA sequence
gcaaattgatgatatcgacgtga

SEQ ID NO: 12628 - DNA, 23 bp, Artificial Sequence
  human ApoB siRNA sequence
caaattgatgatatcgacgtgag

SEQ ID NO: 12629 - DNA, 23 bp, Artificial Sequence
  human ApoB siRNA sequence
aaattgatgatatcgacgtgagg

SEQ ID NO: 12630 - DNA, 23 bp, Artificial Sequence
  human ApoB siRNA sequence
aattgatgatatcgacgtgaggt

SEQ ID NO: 12631 - DNA, 23 bp, Artificial Sequence
  human ApoB siRNA sequence
attgatgatatcgacgtgaggtt

SEQ ID NO: 12632 - DNA, 23 bp, Artificial Sequence
  human ApoB siRNA sequence
ttgatgatatcgacgtgaggttc

SEQ ID NO: 12633 - DNA, 23 bp, Artificial Sequence
  human ApoB siRNA sequence
tgatgatatcgacgtgaggttcc

SEQ ID NO: 12634 - DNA, 23 bp, Artificial Sequence
  human ApoB siRNA sequence
gatgatatcgacgtgaggttcca

SEQ ID NO: 12635 - DNA, 23 bp, Artificial Sequence
  human ApoB siRNA sequence
atgatatcgacgtgaggttccag

SEQ ID NO: 12636 - DNA, 23 bp, Artificial Sequence
  human ApoB siRNA sequence
tgatatcgacgtgaggttccaga

SEQ ID NO: 12637 - DNA, 23 bp, Artificial Sequence
  human ApoB siRNA sequence
gatatcgacgtgaggttccagaa

SEQ ID NO: 12638 - DNA, 23 bp, Artificial Sequence
  human ApoB siRNA sequence
atatcgacgtgaggttccagaaa

SEQ ID NO: 12639 - DNA, 23 bp, Artificial Sequence
  human ApoB siRNA sequence
tatcgacgtgaggttccagaaag

SEQ ID NO: 12640 - DNA, 23 bp, Artificial Sequence
  human ApoB siRNA sequence
atcgacgtgaggttccagaaagc

SEQ ID NO: 12641 - DNA, 23 bp, Artificial Sequence
  human ApoB siRNA sequence
tcgacgtgaggttccagaaagca

SEQ ID NO: 12642 - DNA, 23 bp, Artificial Sequence
  human ApoB siRNA sequence
cgacgtgaggttccagaaagcag

SEQ ID NO: 12643 - DNA, 23 bp, Artificial Sequence
  human ApoB siRNA sequence
gacgtgaggttccagaaagcagc

SEQ ID NO: 12644 - DNA, 23 bp, Artificial Sequence
  human ApoB siRNA sequence
acgtgaggttccagaaagcagcc

SEQ ID NO: 12645 - DNA, 23 bp, Artificial Sequence
  human ApoB siRNA sequence
cgtgaggttccagaaagcagcca

SEQ ID NO: 12646 - DNA, 23 bp, Artificial Sequence
  human ApoB siRNA sequence
gtgaggttccagaaagcagccag

SEQ ID NO: 12647 - DNA, 23 bp, Artificial Sequence
  human ApoB siRNA sequence
tgaggttccagaaagcagccagt

SEQ ID NO: 12648 - DNA, 23 bp, Artificial Sequence
  human ApoB siRNA sequence
gaggttccagaaagcagccagtg

SEQ ID NO: 12649 - DNA, 23 bp, Artificial Sequence
  human ApoB siRNA sequence
aggttccagaaagcagccagtgg

SEQ ID NO: 12650 - DNA, 23 bp, Artificial Sequence
  human ApoB siRNA sequence
ggttccagaaagcagccagtggc

SEQ ID NO: 12651 - DNA, 23 bp, Artificial Sequence
  human ApoB siRNA sequence
gttccagaaagcagccagtggca

SEQ ID NO: 12652 - DNA, 23 bp, Artificial Sequence
  human ApoB siRNA sequence
ttccagaaagcagccagtggcac

SEQ ID NO: 12653 - DNA, 23 bp, Artificial Sequence
  human ApoB siRNA sequence
tccagaaagcagccagtggcacc

SEQ ID NO: 12654 - DNA, 23 bp, Artificial Sequence
  human ApoB siRNA sequence
ccagaaagcagccagtggcacca

SEQ ID NO: 12655 - DNA, 23 bp, Artificial Sequence
  human ApoB siRNA sequence
cagaaagcagccagtggcaccac

SEQ ID NO: 12656 - DNA, 23 bp, Artificial Sequence
  human ApoB siRNA sequence
agaaagcagccagtggcaccact

SEQ ID NO: 12657 - DNA, 23 bp, Artificial Sequence
  human ApoB siRNA sequence
gaaagcagccagtggcaccactg

SEQ ID NO: 12658 - DNA, 23 bp, Artificial Sequence
  human ApoB siRNA sequence
aaagcagccagtggcaccactgg

SEQ ID NO: 12659 - DNA, 23 bp, Artificial Sequence
  human ApoB siRNA sequence
aagcagccagtggcaccactggg

SEQ ID NO: 12660 - DNA, 23 bp, Artificial Sequence
  human ApoB siRNA sequence
agcagccagtggcaccactggga

SEQ ID NO: 12661 - DNA, 23 bp, Artificial Sequence
  human ApoB siRNA sequence
gcagccagtggcaccactgggac

SEQ ID NO: 12662 - DNA, 23 bp, Artificial Sequence
  human ApoB siRNA sequence
cagccagtggcaccactgggacc

SEQ ID NO: 12663 - DNA, 23 bp, Artificial Sequence
  human ApoB siRNA sequence
agccagtggcaccactgggacct

SEQ ID NO: 12664 - DNA, 23 bp, Artificial Sequence
  human ApoB siRNA sequence
gccagtggcaccactgggaccta

SEQ ID NO: 12665 - DNA, 23 bp, Artificial Sequence
  human ApoB siRNA sequence
ccagtggcaccactgggacctac

SEQ ID NO: 12666 - DNA, 23 bp, Artificial Sequence
  human ApoB siRNA sequence
cagtggcaccactgggacctacc

SEQ ID NO: 12667 - DNA, 23 bp, Artificial Sequence
  human ApoB siRNA sequence
agtggcaccactgggacctacca

SEQ ID NO: 12668 - DNA, 23 bp, Artificial Sequence
  human ApoB siRNA sequence
gtggcaccactgggacctaccaa

SEQ ID NO: 12669 - DNA, 23 bp, Artificial Sequence
  human ApoB siRNA sequence
tggcaccactgggacctaccaag

SEQ ID NO: 12670 - DNA, 23 bp, Artificial Sequence
  human ApoB siRNA sequence
ggcaccactgggacctaccaaga

SEQ ID NO: 12671 - DNA, 23 bp, Artificial Sequence
  human ApoB siRNA sequence
gcaccactgggacctaccaagag

SEQ ID NO: 12672 - DNA, 23 bp, Artificial Sequence
  human ApoB siRNA sequence
caccactgggacctaccaagagt

SEQ ID NO: 12673 - DNA, 23 bp, Artificial Sequence
  human ApoB siRNA sequence
accactgggacctaccaagagtg

SEQ ID NO: 12674 - DNA, 23 bp, Artificial Sequence
  human ApoB siRNA sequence
ccactgggacctaccaagagtgg

SEQ ID NO: 12675 - DNA, 23 bp, Artificial Sequence
  human ApoB siRNA sequence
cactgggacctaccaagagtgga

SEQ ID NO: 12676 - DNA, 23 bp, Artificial Sequence
  human ApoB siRNA sequence
actgggacctaccaagagtggaa

SEQ ID NO: 12677 - DNA, 23 bp, Artificial Sequence
  human ApoB siRNA sequence
ctgggacctaccaagagtggaag

SEQ ID NO: 12678 - DNA, 23 bp, Artificial Sequence
  human ApoB siRNA sequence
tgggacctaccaagagtggaagg

SEQ ID NO: 12679 - DNA, 23 bp, Artificial Sequence
  human ApoB siRNA sequence
gggacctaccaagagtggaagga

SEQ ID NO: 12680 - DNA, 23 bp, Artificial Sequence
  human ApoB siRNA sequence
ggacctaccaagagtggaaggac

SEQ ID NO: 12681 - DNA, 23 bp, Artificial Sequence
  human ApoB siRNA sequence
gacctaccaagagtggaaggaca

SEQ ID NO: 12682 - DNA, 23 bp, Artificial Sequence
  human ApoB siRNA sequence
acctaccaagagtggaaggacaa

SEQ ID NO: 12683 - DNA, 23 bp, Artificial Sequence
  human ApoB siRNA sequence
cctaccaagagtggaaggacaag

SEQ ID NO: 12684 - DNA, 23 bp, Artificial Sequence
  human ApoB siRNA sequence
ctaccaagagtggaaggacaagg

SEQ ID NO: 12685 - DNA, 23 bp, Artificial Sequence
  human ApoB siRNA sequence
taccaagagtggaaggacaaggc

SEQ ID NO: 12686 - DNA, 23 bp, Artificial Sequence
  human ApoB siRNA sequence
accaagagtggaaggacaaggcc

SEQ ID NO: 12687 - DNA, 23 bp, Artificial Sequence
  human ApoB siRNA sequence
ccaagagtggaaggacaaggccc

SEQ ID NO: 12688 - DNA, 23 bp, Artificial Sequence
  human ApoB siRNA sequence
caagagtggaaggacaaggccca

SEQ ID NO: 12689 - DNA, 23 bp, Artificial Sequence
  human ApoB siRNA sequence
aagagtggaaggacaaggcccag

SEQ ID NO: 12690 - DNA, 23 bp, Artificial Sequence
  human ApoB siRNA sequence
agagtggaaggacaaggcccaga

SEQ ID NO: 12691 - DNA, 23 bp, Artificial Sequence
  human ApoB siRNA sequence
gagtggaaggacaaggcccagaa

SEQ ID NO: 12692 - DNA, 23 bp, Artificial Sequence
  human ApoB siRNA sequence
agtggaaggacaaggcccagaat

SEQ ID NO: 12693 - DNA, 23 bp, Artificial Sequence
  human ApoB siRNA sequence
gtggaaggacaaggcccagaatc

SEQ ID NO: 12694 - DNA, 23 bp, Artificial Sequence
  human ApoB siRNA sequence
tggaaggacaaggcccagaatct

SEQ ID NO: 12695 - DNA, 23 bp, Artificial Sequence
  human ApoB siRNA sequence
ggaaggacaaggcccagaatctg

SEQ ID NO: 12696 - DNA, 23 bp, Artificial Sequence
  human ApoB siRNA sequence
gaaggacaaggcccagaatctgt

SEQ ID NO: 12697 - DNA, 23 bp, Artificial Sequence
  human ApoB siRNA sequence
aaggacaaggcccagaatctgta

SEQ ID NO: 12698 - DNA, 23 bp, Artificial Sequence
  human ApoB siRNA sequence
aggacaaggcccagaatctgtac

SEQ ID NO: 12699 - DNA, 23 bp, Artificial Sequence
  human ApoB siRNA sequence
ggacaaggcccagaatctgtacc

SEQ ID NO: 12700 - DNA, 23 bp, Artificial Sequence
  human ApoB siRNA sequence
gacaaggcccagaatctgtacca

SEQ ID NO: 12701 - DNA, 23 bp, Artificial Sequence
  human ApoB siRNA sequence
acaaggcccagaatctgtaccag

SEQ ID NO: 12702 - DNA, 23 bp, Artificial Sequence
  human ApoB siRNA sequence
caaggcccagaatctgtaccagg

SEQ ID NO: 12703 - DNA, 23 bp, Artificial Sequence
  human ApoB siRNA sequence
aaggcccagaatctgtaccagga

SEQ ID NO: 12704 - DNA, 23 bp, Artificial Sequence
  human ApoB siRNA sequence
aggcccagaatctgtaccaggaa

SEQ ID NO: 12705 - DNA, 23 bp, Artificial Sequence
  human ApoB siRNA sequence
ggcccagaatctgtaccaggaac

SEQ ID NO: 12706 - DNA, 23 bp, Artificial Sequence
  human ApoB siRNA sequence
gcccagaatctgtaccaggaact

SEQ ID NO: 12707 - DNA, 23 bp, Artificial Sequence
  human ApoB siRNA sequence
cccagaatctgtaccaggaactg

SEQ ID NO: 12708 - DNA, 23 bp, Artificial Sequence
  human ApoB siRNA sequence
ccagaatctgtaccaggaactgt

SEQ ID NO: 12709 - DNA, 23 bp, Artificial Sequence
  human ApoB siRNA sequence
cagaatctgtaccaggaactgtt

SEQ ID NO: 12710 - DNA, 23 bp, Artificial Sequence
  human ApoB siRNA sequence
agaatctgtaccaggaactgttg

SEQ ID NO: 12711 - DNA, 23 bp, Artificial Sequence
  human ApoB siRNA sequence
gaatctgtaccaggaactgttga

SEQ ID NO: 12712 - DNA, 23 bp, Artificial Sequence
  human ApoB siRNA sequence
aatctgtaccaggaactgttgac

SEQ ID NO: 12713 - DNA, 23 bp, Artificial Sequence
  human ApoB siRNA sequence
atctgtaccaggaactgttgact

SEQ ID NO: 12714 - DNA, 23 bp, Artificial Sequence
  human ApoB siRNA sequence
tctgtaccaggaactgttgactc

SEQ ID NO: 12715 - DNA, 23 bp, Artificial Sequence
  human ApoB siRNA sequence
ctgtaccaggaactgttgactca

SEQ ID NO: 12716 - DNA, 23 bp, Artificial Sequence
  human ApoB siRNA sequence
tgtaccaggaactgttgactcag

SEQ ID NO: 12717 - DNA, 23 bp, Artificial Sequence
  human ApoB siRNA sequence
gtaccaggaactgttgactcagg

SEQ ID NO: 12718 - DNA, 23 bp, Artificial Sequence
  human ApoB siRNA sequence
taccaggaactgttgactcagga

SEQ ID NO: 12719 - DNA, 23 bp, Artificial Sequence
  human ApoB siRNA sequence
accaggaactgttgactcaggaa

SEQ ID NO: 12720 - DNA, 23 bp, Artificial Sequence
  human ApoB siRNA sequence
ccaggaactgttgactcaggaag

SEQ ID NO: 12721 - DNA, 23 bp, Artificial Sequence
  human ApoB siRNA sequence
caggaactgttgactcaggaagg

SEQ ID NO: 12722 - DNA, 23 bp, Artificial Sequence
  human ApoB siRNA sequence
aggaactgttgactcaggaaggc

SEQ ID NO: 12723 - DNA, 23 bp, Artificial Sequence
  human ApoB siRNA sequence
ggaactgttgactcaggaaggcc

SEQ ID NO: 12724 - DNA, 23 bp, Artificial Sequence
  human ApoB siRNA sequence
gaactgttgactcaggaaggcca

SEQ ID NO: 12725 - DNA, 23 bp, Artificial Sequence
  human ApoB siRNA sequence
aactgttgactcaggaaggccaa

SEQ ID NO: 12726 - DNA, 23 bp, Artificial Sequence
  human ApoB siRNA sequence
actgttgactcaggaaggccaag

SEQ ID NO: 12727 - DNA, 23 bp, Artificial Sequence
  human ApoB siRNA sequence
ctgttgactcaggaaggccaagc

SEQ ID NO: 12728 - DNA, 23 bp, Artificial Sequence
  human ApoB siRNA sequence
tgttgactcaggaaggccaagcc

SEQ ID NO: 12729 - DNA, 23 bp, Artificial Sequence
  human ApoB siRNA sequence
gttgactcaggaaggccaagcca

SEQ ID NO: 12730 - DNA, 23 bp, Artificial Sequence
  human ApoB siRNA sequence
ttgactcaggaaggccaagccag

SEQ ID NO: 12731 - DNA, 23 bp, Artificial Sequence
  human ApoB siRNA sequence
tgactcaggaaggccaagccagt

SEQ ID NO: 12732 - DNA, 23 bp, Artificial Sequence
  human ApoB siRNA sequence
gactcaggaaggccaagccagtt

SEQ ID NO: 12733 - DNA, 23 bp, Artificial Sequence
  human ApoB siRNA sequence
actcaggaaggccaagccagttt

SEQ ID NO: 12734 - DNA, 23 bp, Artificial Sequence
  human ApoB siRNA sequence
ctcaggaaggccaagccagtttc

SEQ ID NO: 12735 - DNA, 23 bp, Artificial Sequence
  human ApoB siRNA sequence
tcaggaaggccaagccagtttcc

SEQ ID NO: 12736 - DNA, 23 bp, Artificial Sequence
  human ApoB siRNA sequence
caggaaggccaagccagtttcca

SEQ ID NO: 12737 - DNA, 23 bp, Artificial Sequence
  human ApoB siRNA sequence
aggaaggccaagccagtttccag

SEQ ID NO: 12738 - DNA, 23 bp, Artificial Sequence
  human ApoB siRNA sequence
ggaaggccaagccagtttccagg

SEQ ID NO: 12739 - DNA, 23 bp, Artificial Sequence
  human ApoB siRNA sequence
gaaggccaagccagtttccaggg

SEQ ID NO: 12740 - DNA, 23 bp, Artificial Sequence
  human ApoB siRNA sequence
aaggccaagccagtttccaggga

SEQ ID NO: 12741 - DNA, 23 bp, Artificial Sequence
  human ApoB siRNA sequence
aggccaagccagtttccagggac

SEQ ID NO: 12742 - DNA, 23 bp, Artificial Sequence
  human ApoB siRNA sequence
ggccaagccagtttccagggact

SEQ ID NO: 12743 - DNA, 23 bp, Artificial Sequence
  human ApoB siRNA sequence
gccaagccagtttccagggactc

SEQ ID NO: 12744 - DNA, 23 bp, Artificial Sequence
  human ApoB siRNA sequence
ccaagccagtttccagggactca

SEQ ID NO: 12745 - DNA, 23 bp, Artificial Sequence
  human ApoB siRNA sequence
caagccagtttccagggactcaa

SEQ ID NO: 12746 - DNA, 23 bp, Artificial Sequence
  human ApoB siRNA sequence
aagccagtttccagggactcaag

SEQ ID NO: 12747 - DNA, 23 bp, Artificial Sequence
  human ApoB siRNA sequence
agccagtttccagggactcaagg

SEQ ID NO: 12748 - DNA, 23 bp, Artificial Sequence
  human ApoB siRNA sequence
gccagtttccagggactcaagga

SEQ ID NO: 12749 - DNA, 23 bp, Artificial Sequence
  human ApoB siRNA sequence
ccagtttccagggactcaaggat

SEQ ID NO: 12750 - DNA, 23 bp, Artificial Sequence
  human ApoB siRNA sequence
cagtttccagggactcaaggata

SEQ ID NO: 12751 - DNA, 23 bp, Artificial Sequence
  human ApoB siRNA sequence
agtttccagggactcaaggataa

SEQ ID NO: 12752 - DNA, 23 bp, Artificial Sequence
  human ApoB siRNA sequence
gtttccagggactcaaggataac

SEQ ID NO: 12753 - DNA, 23 bp, Artificial Sequence
  human ApoB siRNA sequence
tttccagggactcaaggataacg

SEQ ID NO: 12754 - DNA, 23 bp, Artificial Sequence
  human ApoB siRNA sequence
ttccagggactcaaggataacgt

SEQ ID NO: 12755 - DNA, 23 bp, Artificial Sequence
  human ApoB siRNA sequence
tccagggactcaaggataacgtg

SEQ ID NO: 12756 - DNA, 23 bp, Artificial Sequence
  human ApoB siRNA sequence
ccagggactcaaggataacgtgt

SEQ ID NO: 12757 - DNA, 23 bp, Artificial Sequence
  human ApoB siRNA sequence
cagggactcaaggataacgtgtt

SEQ ID NO: 12758 - DNA, 23 bp, Artificial Sequence
  human ApoB siRNA sequence
agggactcaaggataacgtgttt

SEQ ID NO: 12759 - DNA, 23 bp, Artificial Sequence
  human ApoB siRNA sequence
gggactcaaggataacgtgtttg

SEQ ID NO: 12760 - DNA, 23 bp, Artificial Sequence
  human ApoB siRNA sequence
ggactcaaggataacgtgtttga

SEQ ID NO: 12761 - DNA, 23 bp, Artificial Sequence
  human ApoB siRNA sequence
gactcaaggataacgtgtttgat

SEQ ID NO: 12762 - DNA, 23 bp, Artificial Sequence
  human ApoB siRNA sequence
actcaaggataacgtgtttgatg

SEQ ID NO: 12763 - DNA, 23 bp, Artificial Sequence
  human ApoB siRNA sequence
ctcaaggataacgtgtttgatgg

SEQ ID NO: 12764 - DNA, 23 bp, Artificial Sequence
  human ApoB siRNA sequence
tcaaggataacgtgtttgatggc

SEQ ID NO: 12765 - DNA, 23 bp, Artificial Sequence
  human ApoB siRNA sequence
caaggataacgtgtttgatggct

SEQ ID NO: 12766 - DNA, 23 bp, Artificial Sequence
  human ApoB siRNA sequence
aaggataacgtgtttgatggctt

SEQ ID NO: 12767 - DNA, 23 bp, Artificial Sequence
  human ApoB siRNA sequence
aggataacgtgtttgatggcttg

SEQ ID NO: 12768 - DNA, 23 bp, Artificial Sequence
  human ApoB siRNA sequence
ggataacgtgtttgatggcttgg

SEQ ID NO: 12769 - DNA, 23 bp, Artificial Sequence
  human ApoB siRNA sequence
gataacgtgtttgatggcttggt

SEQ ID NO: 12770 - DNA, 23 bp, Artificial Sequence
  human ApoB siRNA sequence
ataacgtgtttgatggcttggta

SEQ ID NO: 12771 - DNA, 23 bp, Artificial Sequence
  human ApoB siRNA sequence
taacgtgtttgatggcttggtac

SEQ ID NO: 12772 - DNA, 23 bp, Artificial Sequence
  human ApoB siRNA sequence
aacgtgtttgatggcttggtacg

SEQ ID NO: 12773 - DNA, 23 bp, Artificial Sequence
  human ApoB siRNA sequence
acgtgtttgatggcttggtacga

SEQ ID NO: 12774 - DNA, 23 bp, Artificial Sequence
  human ApoB siRNA sequence
cgtgtttgatggcttggtacgag

SEQ ID NO: 12775 - DNA, 23 bp, Artificial Sequence
  human ApoB siRNA sequence
gtgtttgatggcttggtacgagt

SEQ ID NO: 12776 - DNA, 23 bp, Artificial Sequence
  human ApoB siRNA sequence
tgtttgatggcttggtacgagtt

SEQ ID NO: 12777 - DNA, 23 bp, Artificial Sequence
  human ApoB siRNA sequence
gtttgatggcttggtacgagtta

SEQ ID NO: 12778 - DNA, 23 bp, Artificial Sequence
  human ApoB siRNA sequence
tttgatggcttggtacgagttac

SEQ ID NO: 12779 - DNA, 23 bp, Artificial Sequence
  human ApoB siRNA sequence
ttgatggcttggtacgagttact

SEQ ID NO: 12780 - DNA, 23 bp, Artificial Sequence
  human ApoB siRNA sequence
tgatggcttggtacgagttactc

SEQ ID NO: 12781 - DNA, 23 bp, Artificial Sequence
  human ApoB siRNA sequence
gatggcttggtacgagttactca

SEQ ID NO: 12782 - DNA, 23 bp, Artificial Sequence
  human ApoB siRNA sequence
atggcttggtacgagttactcaa

SEQ ID NO: 12783 - DNA, 23 bp, Artificial Sequence
  human ApoB siRNA sequence
tggcttggtacgagttactcaaa

SEQ ID NO: 12784 - DNA, 23 bp, Artificial Sequence
  human ApoB siRNA sequence
ggcttggtacgagttactcaaaa

SEQ ID NO: 12785 - DNA, 23 bp, Artificial Sequence
  human ApoB siRNA sequence
gcttggtacgagttactcaaaaa

SEQ ID NO: 12786 - DNA, 23 bp, Artificial Sequence
  human ApoB siRNA sequence
cttggtacgagttactcaaaaat

SEQ ID NO: 12787 - DNA, 23 bp, Artificial Sequence
  human ApoB siRNA sequence
ttggtacgagttactcaaaaatt

SEQ ID NO: 12788 - DNA, 23 bp, Artificial Sequence
  human ApoB siRNA sequence
tggtacgagttactcaaaaattc

SEQ ID NO: 12789 - DNA, 23 bp, Artificial Sequence
  human ApoB siRNA sequence
ggtacgagttactcaaaaattcc

SEQ ID NO: 12790 - DNA, 23 bp, Artificial Sequence
  human ApoB siRNA sequence
gtacgagttactcaaaaattcca

SEQ ID NO: 12791 - DNA, 23 bp, Artificial Sequence
  human ApoB siRNA sequence
tacgagttactcaaaaattccat

SEQ ID NO: 12792 - DNA, 23 bp, Artificial Sequence
  human ApoB siRNA sequence
acgagttactcaaaaattccata

SEQ ID NO: 12793 - DNA, 23 bp, Artificial Sequence
  human ApoB siRNA sequence
cgagttactcaaaaattccatat

SEQ ID NO: 12794 - DNA, 23 bp, Artificial Sequence
  human ApoB siRNA sequence
gagttactcaaaaattccatatg

SEQ ID NO: 12795 - DNA, 23 bp, Artificial Sequence
  human ApoB siRNA sequence
agttactcaaaaattccatatga

SEQ ID NO: 12796 - DNA, 23 bp, Artificial Sequence
  human ApoB siRNA sequence
gttactcaaaaattccatatgaa

SEQ ID NO: 12797 - DNA, 23 bp, Artificial Sequence
  human ApoB siRNA sequence
ttactcaaaaattccatatgaaa

SEQ ID NO: 12798 - DNA, 23 bp, Artificial Sequence
  human ApoB siRNA sequence
tactcaaaaattccatatgaaag

SEQ ID NO: 12799 - DNA, 23 bp, Artificial Sequence
  human ApoB siRNA sequence
actcaaaaattccatatgaaagt

SEQ ID NO: 12800 - DNA, 23 bp, Artificial Sequence
  human ApoB siRNA sequence
ctcaaaaattccatatgaaagtc

SEQ ID NO: 12801 - DNA, 23 bp, Artificial Sequence
  human ApoB siRNA sequence
tcaaaaattccatatgaaagtca

SEQ ID NO: 12802 - DNA, 23 bp, Artificial Sequence
  human ApoB siRNA sequence
caaaaattccatatgaaagtcaa

SEQ ID NO: 12803 - DNA, 23 bp, Artificial Sequence
  human ApoB siRNA sequence
aaaaattccatatgaaagtcaag

SEQ ID NO: 12804 - DNA, 23 bp, Artificial Sequence
  human ApoB siRNA sequence
aaaattccatatgaaagtcaagc

SEQ ID NO: 12805 - DNA, 23 bp, Artificial Sequence
  human ApoB siRNA sequence
aaattccatatgaaagtcaagca

SEQ ID NO: 12806 - DNA, 23 bp, Artificial Sequence
  human ApoB siRNA sequence
aattccatatgaaagtcaagcat

SEQ ID NO: 12807 - DNA, 23 bp, Artificial Sequence
  human ApoB siRNA sequence
attccatatgaaagtcaagcatc

SEQ ID NO: 12808 - DNA, 23 bp, Artificial Sequence
  human ApoB siRNA sequence
ttccatatgaaagtcaagcatct

SEQ ID NO: 12809 - DNA, 23 bp, Artificial Sequence
  human ApoB siRNA sequence
tccatatgaaagtcaagcatctg

SEQ ID NO: 12810 - DNA, 23 bp, Artificial Sequence
  human ApoB siRNA sequence
ccatatgaaagtcaagcatctga

SEQ ID NO: 12811 - DNA, 23 bp, Artificial Sequence
  human ApoB siRNA sequence
catatgaaagtcaagcatctgat

SEQ ID NO: 12812 - DNA, 23 bp, Artificial Sequence
  human ApoB siRNA sequence
atatgaaagtcaagcatctgatt

SEQ ID NO: 12813 - DNA, 23 bp, Artificial Sequence
  human ApoB siRNA sequence
tatgaaagtcaagcatctgattg

SEQ ID NO: 12814 - DNA, 23 bp, Artificial Sequence
  human ApoB siRNA sequence
atgaaagtcaagcatctgattga

SEQ ID NO: 12815 - DNA, 23 bp, Artificial Sequence
  human ApoB siRNA sequence
tgaaagtcaagcatctgattgac

SEQ ID NO: 12816 - DNA, 23 bp, Artificial Sequence
  human ApoB siRNA sequence
gaaagtcaagcatctgattgact

SEQ ID NO: 12817 - DNA, 23 bp, Artificial Sequence
  human ApoB siRNA sequence
aaagtcaagcatctgattgactc

SEQ ID NO: 12818 - DNA, 23 bp, Artificial Sequence
  human ApoB siRNA sequence
aagtcaagcatctgattgactca

SEQ ID NO: 12819 - DNA, 23 bp, Artificial Sequence
  human ApoB siRNA sequence
agtcaagcatctgattgactcac

SEQ ID NO: 12820 - DNA, 23 bp, Artificial Sequence
  human ApoB siRNA sequence
gtcaagcatctgattgactcact

SEQ ID NO: 12821 - DNA, 23 bp, Artificial Sequence
  human ApoB siRNA sequence
tcaagcatctgattgactcactc

SEQ ID NO: 12822 - DNA, 23 bp, Artificial Sequence
  human ApoB siRNA sequence
caagcatctgattgactcactca

SEQ ID NO: 12823 - DNA, 23 bp, Artificial Sequence
  human ApoB siRNA sequence
aagcatctgattgactcactcat

SEQ ID NO: 12824 - DNA, 23 bp, Artificial Sequence
  human ApoB siRNA sequence
agcatctgattgactcactcatt

SEQ ID NO: 12825 - DNA, 23 bp, Artificial Sequence
  human ApoB siRNA sequence
gcatctgattgactcactcattg

SEQ ID NO: 12826 - DNA, 23 bp, Artificial Sequence
  human ApoB siRNA sequence
catctgattgactcactcattga

SEQ ID NO: 12827 - DNA, 23 bp, Artificial Sequence
  human ApoB siRNA sequence
atctgattgactcactcattgat

SEQ ID NO: 12828 - DNA, 23 bp, Artificial Sequence
  human ApoB siRNA sequence
tctgattgactcactcattgatt

SEQ ID NO: 12829 - DNA, 23 bp, Artificial Sequence
  human ApoB siRNA sequence
ctgattgactcactcattgattt

SEQ ID NO: 12830 - DNA, 23 bp, Artificial Sequence
  human ApoB siRNA sequence
tgattgactcactcattgatttt

SEQ ID NO: 12831 - DNA, 23 bp, Artificial Sequence
  human ApoB siRNA sequence
gattgactcactcattgattttc

SEQ ID NO: 12832 - DNA, 23 bp, Artificial Sequence
  human ApoB siRNA sequence
attgactcactcattgattttct

SEQ ID NO: 12833 - DNA, 23 bp, Artificial Sequence
  human ApoB siRNA sequence
ttgactcactcattgattttctg

SEQ ID NO: 12834 - DNA, 23 bp, Artificial Sequence
  human ApoB siRNA sequence
tgactcactcattgattttctga

SEQ ID NO: 12835 - DNA, 23 bp, Artificial Sequence
  human ApoB siRNA sequence
gactcactcattgattttctgaa

SEQ ID NO: 12836 - DNA, 23 bp, Artificial Sequence
  human ApoB siRNA sequence
actcactcattgattttctgaac

SEQ ID NO: 12837 - DNA, 23 bp, Artificial Sequence
  human ApoB siRNA sequence
ctcactcattgattttctgaact

SEQ ID NO: 12838 - DNA, 23 bp, Artificial Sequence
  human ApoB siRNA sequence
tcactcattgattttctgaactt

SEQ ID NO: 12839 - DNA, 23 bp, Artificial Sequence
  human ApoB siRNA sequence
cactcattgattttctgaacttc

SEQ ID NO: 12840 - DNA, 23 bp, Artificial Sequence
  human ApoB siRNA sequence
actcattgattttctgaacttcc

SEQ ID NO: 12841 - DNA, 23 bp, Artificial Sequence
  human ApoB siRNA sequence
ctcattgattttctgaacttccc

SEQ ID NO: 12842 - DNA, 23 bp, Artificial Sequence
  human ApoB siRNA sequence
tcattgattttctgaacttcccc

SEQ ID NO: 12843 - DNA, 23 bp, Artificial Sequence
  human ApoB siRNA sequence
cattgattttctgaacttcccca

SEQ ID NO: 12844 - DNA, 23 bp, Artificial Sequence
  human ApoB siRNA sequence
attgattttctgaacttccccag

SEQ ID NO: 12845 - DNA, 23 bp, Artificial Sequence
  human ApoB siRNA sequence
ttgattttctgaacttccccaga

SEQ ID NO: 12846 - DNA, 23 bp, Artificial Sequence
  human ApoB siRNA sequence
tgattttctgaacttccccagat

SEQ ID NO: 12847 - DNA, 23 bp, Artificial Sequence
  human ApoB siRNA sequence
gattttctgaacttccccagatt

SEQ ID NO: 12848 - DNA, 23 bp, Artificial Sequence
  human ApoB siRNA sequence
attttctgaacttccccagattc

SEQ ID NO: 12849 - DNA, 23 bp, Artificial Sequence
  human ApoB siRNA sequence
ttttctgaacttccccagattcc

SEQ ID NO: 12850 - DNA, 23 bp, Artificial Sequence
  human ApoB siRNA sequence
tttctgaacttccccagattcca

SEQ ID NO: 12851 - DNA, 23 bp, Artificial Sequence
  human ApoB siRNA sequence
ttctgaacttccccagattccag

SEQ ID NO: 12852 - DNA, 23 bp, Artificial Sequence
  human ApoB siRNA sequence
tctgaacttccccagattccagt

SEQ ID NO: 12853 - DNA, 23 bp, Artificial Sequence
  human ApoB siRNA sequence
ctgaacttccccagattccagtt

SEQ ID NO: 12854 - DNA, 23 bp, Artificial Sequence
  human ApoB siRNA sequence
tgaacttccccagattccagttt

SEQ ID NO: 12855 - DNA, 23 bp, Artificial Sequence
  human ApoB siRNA sequence
gaacttccccagattccagtttc

SEQ ID NO: 12856 - DNA, 23 bp, Artificial Sequence
  human ApoB siRNA sequence
aacttccccagattccagtttcc

SEQ ID NO: 12857 - DNA, 23 bp, Artificial Sequence
  human ApoB siRNA sequence
acttccccagattccagtttccg

SEQ ID NO: 12858 - DNA, 23 bp, Artificial Sequence
  human ApoB siRNA sequence
cttccccagattccagtttccgg

SEQ ID NO: 12859 - DNA, 23 bp, Artificial Sequence
  human ApoB siRNA sequence
ttccccagattccagtttccggg

SEQ ID NO: 12860 - DNA, 23 bp, Artificial Sequence
  human ApoB siRNA sequence
tccccagattccagtttccgggg

SEQ ID NO: 12861 - DNA, 23 bp, Artificial Sequence
  human ApoB siRNA sequence
ccccagattccagtttccgggga

SEQ ID NO: 12862 - DNA, 23 bp, Artificial Sequence
  human ApoB siRNA sequence
cccagattccagtttccggggaa

SEQ ID NO: 12863 - DNA, 23 bp, Artificial Sequence
  human ApoB siRNA sequence
ccagattccagtttccggggaaa

SEQ ID NO: 12864 - DNA, 23 bp, Artificial Sequence
  human ApoB siRNA sequence
cagattccagtttccggggaaac

SEQ ID NO: 12865 - DNA, 23 bp, Artificial Sequence
  human ApoB siRNA sequence
agattccagtttccggggaaacc

SEQ ID NO: 12866 - DNA, 23 bp, Artificial Sequence
  human ApoB siRNA sequence
gattccagtttccggggaaacct

SEQ ID NO: 12867 - DNA, 23 bp, Artificial Sequence
  human ApoB siRNA sequence
attccagtttccggggaaacctg

SEQ ID NO: 12868 - DNA, 23 bp, Artificial Sequence
  human ApoB siRNA sequence
ttccagtttccggggaaacctgg

SEQ ID NO: 12869 - DNA, 23 bp, Artificial Sequence
  human ApoB siRNA sequence
tccagtttccggggaaacctggg

SEQ ID NO: 12870 - DNA, 23 bp, Artificial Sequence
  human ApoB siRNA sequence
ccagtttccggggaaacctggga

SEQ ID NO: 12871 - DNA, 23 bp, Artificial Sequence
  human ApoB siRNA sequence
cagtttccggggaaacctgggat

SEQ ID NO: 12872 - DNA, 23 bp, Artificial Sequence
  human ApoB siRNA sequence
agtttccggggaaacctgggata

SEQ ID NO: 12873 - DNA, 23 bp, Artificial Sequence
  human ApoB siRNA sequence
gtttccggggaaacctgggatat

SEQ ID NO: 12874 - DNA, 23 bp, Artificial Sequence
  human ApoB siRNA sequence
tttccggggaaacctgggatata

SEQ ID NO: 12875 - DNA, 23 bp, Artificial Sequence
  human ApoB siRNA sequence
ttccggggaaacctgggatatac

SEQ ID NO: 12876 - DNA, 23 bp, Artificial Sequence
  human ApoB siRNA sequence
tccggggaaacctgggatataca

SEQ ID NO: 12877 - DNA, 23 bp, Artificial Sequence
  human ApoB siRNA sequence
ccggggaaacctgggatatacac

SEQ ID NO: 12878 - DNA, 23 bp, Artificial Sequence
  human ApoB siRNA sequence
cggggaaacctgggatatacact

SEQ ID NO: 12879 - DNA, 23 bp, Artificial Sequence
  human ApoB siRNA sequence
ggggaaacctgggatatacacta

SEQ ID NO: 12880 - DNA, 23 bp, Artificial Sequence
  human ApoB siRNA sequence
gggaaacctgggatatacactag

SEQ ID NO: 12881 - DNA, 23 bp, Artificial Sequence
  human ApoB siRNA sequence
ggaaacctgggatatacactagg

SEQ ID NO: 12882 - DNA, 23 bp, Artificial Sequence
  human ApoB siRNA sequence
gaaacctgggatatacactaggg

SEQ ID NO: 12883 - DNA, 23 bp, Artificial Sequence
  human ApoB siRNA sequence
aaacctgggatatacactaggga

SEQ ID NO: 12884 - DNA, 23 bp, Artificial Sequence
  human ApoB siRNA sequence
aacctgggatatacactagggag

SEQ ID NO: 12885 - DNA, 23 bp, Artificial Sequence
  human ApoB siRNA sequence
acctgggatatacactagggagg

SEQ ID NO: 12886 - DNA, 23 bp, Artificial Sequence
  human ApoB siRNA sequence
cctgggatatacactagggagga

SEQ ID NO: 12887 - DNA, 23 bp, Artificial Sequence
  human ApoB siRNA sequence
ctgggatatacactagggaggaa

SEQ ID NO: 12888 - DNA, 23 bp, Artificial Sequence
  human ApoB siRNA sequence
tgggatatacactagggaggaac

SEQ ID NO: 12889 - DNA, 23 bp, Artificial Sequence
  human ApoB siRNA sequence
gggatatacactagggaggaact

SEQ ID NO: 12890 - DNA, 23 bp, Artificial Sequence
  human ApoB siRNA sequence
ggatatacactagggaggaactt

SEQ ID NO: 12891 - DNA, 23 bp, Artificial Sequence
  human ApoB siRNA sequence
gatatacactagggaggaacttt

SEQ ID NO: 12892 - DNA, 23 bp, Artificial Sequence
  human ApoB siRNA sequence
atatacactagggaggaactttg

SEQ ID NO: 12893 - DNA, 23 bp, Artificial Sequence
  human ApoB siRNA sequence
tatacactagggaggaactttgc

SEQ ID NO: 12894 - DNA, 23 bp, Artificial Sequence
  human ApoB siRNA sequence
atacactagggaggaactttgca

SEQ ID NO: 12895 - DNA, 23 bp, Artificial Sequence
  human ApoB siRNA sequence
tacactagggaggaactttgcac

SEQ ID NO: 12896 - DNA, 23 bp, Artificial Sequence
  human ApoB siRNA sequence
acactagggaggaactttgcact

SEQ ID NO: 12897 - DNA, 23 bp, Artificial Sequence
  human ApoB siRNA sequence
cactagggaggaactttgcacta

SEQ ID NO: 12898 - DNA, 23 bp, Artificial Sequence
  human ApoB siRNA sequence
actagggaggaactttgcactat

SEQ ID NO: 12899 - DNA, 23 bp, Artificial Sequence
  human ApoB siRNA sequence
ctagggaggaactttgcactatg

SEQ ID NO: 12900 - DNA, 23 bp, Artificial Sequence
  human ApoB siRNA sequence
tagggaggaactttgcactatgt

SEQ ID NO: 12901 - DNA, 23 bp, Artificial Sequence
  human ApoB siRNA sequence
agggaggaactttgcactatgtt

SEQ ID NO: 12902 - DNA, 23 bp, Artificial Sequence
  human ApoB siRNA sequence
gggaggaactttgcactatgttc

SEQ ID NO: 12903 - DNA, 23 bp, Artificial Sequence
  human ApoB siRNA sequence
ggaggaactttgcactatgttca

SEQ ID NO: 12904 - DNA, 23 bp, Artificial Sequence
  human ApoB siRNA sequence
gaggaactttgcactatgttcat

SEQ ID NO: 12905 - DNA, 23 bp, Artificial Sequence
  human ApoB siRNA sequence
aggaactttgcactatgttcata

SEQ ID NO: 12906 - DNA, 23 bp, Artificial Sequence
  human ApoB siRNA sequence
ggaactttgcactatgttcataa

SEQ ID NO: 12907 - DNA, 23 bp, Artificial Sequence
  human ApoB siRNA sequence
gaactttgcactatgttcataag

SEQ ID NO: 12908 - DNA, 23 bp, Artificial Sequence
  human ApoB siRNA sequence
aactttgcactatgttcataagg

SEQ ID NO: 12909 - DNA, 23 bp, Artificial Sequence
  human ApoB siRNA sequence
actttgcactatgttcataaggg

SEQ ID NO: 12910 - DNA, 23 bp, Artificial Sequence
  human ApoB siRNA sequence
ctttgcactatgttcataaggga

SEQ ID NO: 12911 - DNA, 23 bp, Artificial Sequence
  human ApoB siRNA sequence
tttgcactatgttcataagggag

SEQ ID NO: 12912 - DNA, 23 bp, Artificial Sequence
  human ApoB siRNA sequence
ttgcactatgttcataagggagg

SEQ ID NO: 12913 - DNA, 23 bp, Artificial Sequence
  human ApoB siRNA sequence
tgcactatgttcataagggaggt

SEQ ID NO: 12914 - DNA, 23 bp, Artificial Sequence
  human ApoB siRNA sequence
gcactatgttcataagggaggta

SEQ ID NO: 12915 - DNA, 23 bp, Artificial Sequence
  human ApoB siRNA sequence
cactatgttcataagggaggtag

SEQ ID NO: 12916 - DNA, 23 bp, Artificial Sequence
  human ApoB siRNA sequence
actatgttcataagggaggtagg

SEQ ID NO: 12917 - DNA, 23 bp, Artificial Sequence
  human ApoB siRNA sequence
ctatgttcataagggaggtaggg

SEQ ID NO: 12918 - DNA, 23 bp, Artificial Sequence
  human ApoB siRNA sequence
tatgttcataagggaggtaggga

SEQ ID NO: 12919 - DNA, 23 bp, Artificial Sequence
  human ApoB siRNA sequence
atgttcataagggaggtagggac

SEQ ID NO: 12920 - DNA, 23 bp, Artificial Sequence
  human ApoB siRNA sequence
tgttcataagggaggtagggacg

SEQ ID NO: 12921 - DNA, 23 bp, Artificial Sequence
  human ApoB siRNA sequence
gttcataagggaggtagggacgg

SEQ ID NO: 12922 - DNA, 23 bp, Artificial Sequence
  human ApoB siRNA sequence
ttcataagggaggtagggacggt

SEQ ID NO: 12923 - DNA, 23 bp, Artificial Sequence
  human ApoB siRNA sequence
tcataagggaggtagggacggta

SEQ ID NO: 12924 - DNA, 23 bp, Artificial Sequence
  human ApoB siRNA sequence
cataagggaggtagggacggtac

SEQ ID NO: 12925 - DNA, 23 bp, Artificial Sequence
  human ApoB siRNA sequence
ataagggaggtagggacggtact

SEQ ID NO: 12926 - DNA, 23 bp, Artificial Sequence
  human ApoB siRNA sequence
taagggaggtagggacggtactg

SEQ ID NO: 12927 - DNA, 23 bp, Artificial Sequence
  human ApoB siRNA sequence
aagggaggtagggacggtactgt

SEQ ID NO: 12928 - DNA, 23 bp, Artificial Sequence
  human ApoB siRNA sequence
agggaggtagggacggtactgtc

SEQ ID NO: 12929 - DNA, 23 bp, Artificial Sequence
  human ApoB siRNA sequence
gggaggtagggacggtactgtcc

SEQ ID NO: 12930 - DNA, 23 bp, Artificial Sequence
  human ApoB siRNA sequence
ggaggtagggacggtactgtccc

SEQ ID NO: 12931 - DNA, 23 bp, Artificial Sequence
  human ApoB siRNA sequence
gaggtagggacggtactgtccca

SEQ ID NO: 12932 - DNA, 23 bp, Artificial Sequence
  human ApoB siRNA sequence
aggtagggacggtactgtcccag

SEQ ID NO: 12933 - DNA, 23 bp, Artificial Sequence
  human ApoB siRNA sequence
ggtagggacggtactgtcccagg

SEQ ID NO: 12934 - DNA, 23 bp, Artificial Sequence
  human ApoB siRNA sequence
gtagggacggtactgtcccaggt

SEQ ID NO: 12935 - DNA, 23 bp, Artificial Sequence
  human ApoB siRNA sequence
tagggacggtactgtcccaggta

SEQ ID NO: 12936 - DNA, 23 bp, Artificial Sequence
  human ApoB siRNA sequence
agggacggtactgtcccaggtat

SEQ ID NO: 12937 - DNA, 23 bp, Artificial Sequence
  human ApoB siRNA sequence
gggacggtactgtcccaggtata

SEQ ID NO: 12938 - DNA, 23 bp, Artificial Sequence
  human ApoB siRNA sequence
ggacggtactgtcccaggtatat

SEQ ID NO: 12939 - DNA, 23 bp, Artificial Sequence
  human ApoB siRNA sequence
gacggtactgtcccaggtatatt

SEQ ID NO: 12940 - DNA, 23 bp, Artificial Sequence
  human ApoB siRNA sequence
acggtactgtcccaggtatattc

SEQ ID NO: 12941 - DNA, 23 bp, Artificial Sequence
  human ApoB siRNA sequence
cggtactgtcccaggtatattcg

SEQ ID NO: 12942 - DNA, 23 bp, Artificial Sequence
  human ApoB siRNA sequence
ggtactgtcccaggtatattcga

SEQ ID NO: 12943 - DNA, 23 bp, Artificial Sequence
  human ApoB siRNA sequence
gtactgtcccaggtatattcgaa

SEQ ID NO: 12944 - DNA, 23 bp, Artificial Sequence
  human ApoB siRNA sequence
tactgtcccaggtatattcgaaa

SEQ ID NO: 12945 - DNA, 23 bp, Artificial Sequence
  human ApoB siRNA sequence
actgtcccaggtatattcgaaag

SEQ ID NO: 12946 - DNA, 23 bp, Artificial Sequence
  human ApoB siRNA sequence
ctgtcccaggtatattcgaaagt

SEQ ID NO: 12947 - DNA, 23 bp, Artificial Sequence
  human ApoB siRNA sequence
tgtcccaggtatattcgaaagtc

SEQ ID NO: 12948 - DNA, 23 bp, Artificial Sequence
  human ApoB siRNA sequence
gtcccaggtatattcgaaagtcc

SEQ ID NO: 12949 - DNA, 23 bp, Artificial Sequence
  human ApoB siRNA sequence
tcccaggtatattcgaaagtcca

SEQ ID NO: 12950 - DNA, 23 bp, Artificial Sequence
  human ApoB siRNA sequence
cccaggtatattcgaaagtccat

SEQ ID NO: 12951 - DNA, 23 bp, Artificial Sequence
  human ApoB siRNA sequence
ccaggtatattcgaaagtccata

SEQ ID NO: 12952 - DNA, 23 bp, Artificial Sequence
  human ApoB siRNA sequence
caggtatattcgaaagtccataa

SEQ ID NO: 12953 - DNA, 23 bp, Artificial Sequence
  human ApoB siRNA sequence
aggtatattcgaaagtccataat

SEQ ID NO: 12954 - DNA, 23 bp, Artificial Sequence
  human ApoB siRNA sequence
ggtatattcgaaagtccataatg

SEQ ID NO: 12955 - DNA, 23 bp, Artificial Sequence
  human ApoB siRNA sequence
gtatattcgaaagtccataatgg

SEQ ID NO: 12956 - DNA, 23 bp, Artificial Sequence
  human ApoB siRNA sequence
tatattcgaaagtccataatggt

SEQ ID NO: 12957 - DNA, 23 bp, Artificial Sequence
  human ApoB siRNA sequence
atattcgaaagtccataatggtt

SEQ ID NO: 12958 - DNA, 23 bp, Artificial Sequence
  human ApoB siRNA sequence
tattcgaaagtccataatggttc

SEQ ID NO: 12959 - DNA, 23 bp, Artificial Sequence
  human ApoB siRNA sequence
attcgaaagtccataatggttca

SEQ ID NO: 12960 - DNA, 23 bp, Artificial Sequence
  human ApoB siRNA sequence
ttcgaaagtccataatggttcag

SEQ ID NO: 12961 - DNA, 23 bp, Artificial Sequence
  human ApoB siRNA sequence
tcgaaagtccataatggttcaga

SEQ ID NO: 12962 - DNA, 23 bp, Artificial Sequence
  human ApoB siRNA sequence
cgaaagtccataatggttcagaa

SEQ ID NO: 12963 - DNA, 23 bp, Artificial Sequence
  human ApoB siRNA sequence
gaaagtccataatggttcagaaa

SEQ ID NO: 12964 - DNA, 23 bp, Artificial Sequence
  human ApoB siRNA sequence
aaagtccataatggttcagaaat

SEQ ID NO: 12965 - DNA, 23 bp, Artificial Sequence
  human ApoB siRNA sequence
aagtccataatggttcagaaata

SEQ ID NO: 12966 - DNA, 23 bp, Artificial Sequence
  human ApoB siRNA sequence
agtccataatggttcagaaatac

SEQ ID NO: 12967 - DNA, 23 bp, Artificial Sequence
  human ApoB siRNA sequence
gtccataatggttcagaaatact

SEQ ID NO: 12968 - DNA, 23 bp, Artificial Sequence
  human ApoB siRNA sequence
tccataatggttcagaaatactg

SEQ ID NO: 12969 - DNA, 23 bp, Artificial Sequence
  human ApoB siRNA sequence
ccataatggttcagaaatactgt

SEQ ID NO: 12970 - DNA, 23 bp, Artificial Sequence
  human ApoB siRNA sequence
cataatggttcagaaatactgtt

SEQ ID NO: 12971 - DNA, 23 bp, Artificial Sequence
  human ApoB siRNA sequence
ataatggttcagaaatactgttt

SEQ ID NO: 12972 - DNA, 23 bp, Artificial Sequence
  human ApoB siRNA sequence
taatggttcagaaatactgtttt

SEQ ID NO: 12973 - DNA, 23 bp, Artificial Sequence
  human ApoB siRNA sequence
aatggttcagaaatactgttttc

SEQ ID NO: 12974 - DNA, 23 bp, Artificial Sequence
  human ApoB siRNA sequence
atggttcagaaatactgttttcc

SEQ ID NO: 12975 - DNA, 23 bp, Artificial Sequence
  human ApoB siRNA sequence
tggttcagaaatactgttttcct

SEQ ID NO: 12976 - DNA, 23 bp, Artificial Sequence
  human ApoB siRNA sequence
ggttcagaaatactgttttccta

SEQ ID NO: 12977 - DNA, 23 bp, Artificial Sequence
  human ApoB siRNA sequence
gttcagaaatactgttttcctat

SEQ ID NO: 12978 - DNA, 23 bp, Artificial Sequence
  human ApoB siRNA sequence
ttcagaaatactgttttcctatt

SEQ ID NO: 12979 - DNA, 23 bp, Artificial Sequence
  human ApoB siRNA sequence
tcagaaatactgttttcctattt

SEQ ID NO: 12980 - DNA, 23 bp, Artificial Sequence
  human ApoB siRNA sequence
cagaaatactgttttcctatttc

SEQ ID NO: 12981 - DNA, 23 bp, Artificial Sequence
  human ApoB siRNA sequence
agaaatactgttttcctatttcc

SEQ ID NO: 12982 - DNA, 23 bp, Artificial Sequence
  human ApoB siRNA sequence
gaaatactgttttcctatttcca

SEQ ID NO: 12983 - DNA, 23 bp, Artificial Sequence
  human ApoB siRNA sequence
aaatactgttttcctatttccaa

SEQ ID NO: 12984 - DNA, 23 bp, Artificial Sequence
  human ApoB siRNA sequence
aatactgttttcctatttccaag

SEQ ID NO: 12985 - DNA, 23 bp, Artificial Sequence
  human ApoB siRNA sequence
atactgttttcctatttccaaga

SEQ ID NO: 12986 - DNA, 23 bp, Artificial Sequence
  human ApoB siRNA sequence
tactgttttcctatttccaagac

SEQ ID NO: 12987 - DNA, 23 bp, Artificial Sequence
  human ApoB siRNA sequence
actgttttcctatttccaagacc

SEQ ID NO: 12988 - DNA, 23 bp, Artificial Sequence
  human ApoB siRNA sequence
ctgttttcctatttccaagacct

SEQ ID NO: 12989 - DNA, 23 bp, Artificial Sequence
  human ApoB siRNA sequence
tgttttcctatttccaagaccta

SEQ ID NO: 12990 - DNA, 23 bp, Artificial Sequence
  human ApoB siRNA sequence
gttttcctatttccaagacctag

SEQ ID NO: 12991 - DNA, 23 bp, Artificial Sequence
  human ApoB siRNA sequence
ttttcctatttccaagacctagt

SEQ ID NO: 12992 - DNA, 23 bp, Artificial Sequence
  human ApoB siRNA sequence
tttcctatttccaagacctagtg

SEQ ID NO: 12993 - DNA, 23 bp, Artificial Sequence
  human ApoB siRNA sequence
ttcctatttccaagacctagtga

SEQ ID NO: 12994 - DNA, 23 bp, Artificial Sequence
  human ApoB siRNA sequence
tcctatttccaagacctagtgat

SEQ ID NO: 12995 - DNA, 23 bp, Artificial Sequence
  human ApoB siRNA sequence
cctatttccaagacctagtgatt

SEQ ID NO: 12996 - DNA, 23 bp, Artificial Sequence
  human ApoB siRNA sequence
ctatttccaagacctagtgatta

SEQ ID NO: 12997 - DNA, 23 bp, Artificial Sequence
  human ApoB siRNA sequence
tatttccaagacctagtgattac

SEQ ID NO: 12998 - DNA, 23 bp, Artificial Sequence
  human ApoB siRNA sequence
atttccaagacctagtgattaca

SEQ ID NO: 12999 - DNA, 23 bp, Artificial Sequence
  human ApoB siRNA sequence
tttccaagacctagtgattacac

SEQ ID NO: 13000 - DNA, 23 bp, Artificial Sequence
  human ApoB siRNA sequence
ttccaagacctagtgattacact

SEQ ID NO: 13001 - DNA, 23 bp, Artificial Sequence
  human ApoB siRNA sequence
tccaagacctagtgattacactt

SEQ ID NO: 13002 - DNA, 23 bp, Artificial Sequence
  human ApoB siRNA sequence
ccaagacctagtgattacacttc

SEQ ID NO: 13003 - DNA, 23 bp, Artificial Sequence
  human ApoB siRNA sequence
caagacctagtgattacacttcc

SEQ ID NO: 13004 - DNA, 23 bp, Artificial Sequence
  human ApoB siRNA sequence
aagacctagtgattacacttcct

SEQ ID NO: 13005 - DNA, 23 bp, Artificial Sequence
  human ApoB siRNA sequence
agacctagtgattacacttcctt

SEQ ID NO: 13006 - DNA, 23 bp, Artificial Sequence
  human ApoB siRNA sequence
gacctagtgattacacttccttt

SEQ ID NO: 13007 - DNA, 23 bp, Artificial Sequence
  human ApoB siRNA sequence
acctagtgattacacttcctttc

SEQ ID NO: 13008 - DNA, 23 bp, Artificial Sequence
  human ApoB siRNA sequence
cctagtgattacacttcctttcg

SEQ ID NO: 13009 - DNA, 23 bp, Artificial Sequence
  human ApoB siRNA sequence
ctagtgattacacttcctttcga

SEQ ID NO: 13010 - DNA, 23 bp, Artificial Sequence
  human ApoB siRNA sequence
tagtgattacacttcctttcgag

SEQ ID NO: 13011 - DNA, 23 bp, Artificial Sequence
  human ApoB siRNA sequence
agtgattacacttcctttcgagt

SEQ ID NO: 13012 - DNA, 23 bp, Artificial Sequence
  human ApoB siRNA sequence
gtgattacacttcctttcgagtt

SEQ ID NO: 13013 - DNA, 23 bp, Artificial Sequence
  human ApoB siRNA sequence
tgattacacttcctttcgagtta

SEQ ID NO: 13014 - DNA, 23 bp, Artificial Sequence
  human ApoB siRNA sequence
gattacacttcctttcgagttaa

SEQ ID NO: 13015 - DNA, 23 bp, Artificial Sequence
  human ApoB siRNA sequence
attacacttcctttcgagttaag

SEQ ID NO: 13016 - DNA, 23 bp, Artificial Sequence
  human ApoB siRNA sequence
ttacacttcctttcgagttaagg

SEQ ID NO: 13017 - DNA, 23 bp, Artificial Sequence
  human ApoB siRNA sequence
tacacttcctttcgagttaagga

SEQ ID NO: 13018 - DNA, 23 bp, Artificial Sequence
  human ApoB siRNA sequence
acacttcctttcgagttaaggaa

SEQ ID NO: 13019 - DNA, 23 bp, Artificial Sequence
  human ApoB siRNA sequence
cacttcctttcgagttaaggaaa

SEQ ID NO: 13020 - DNA, 23 bp, Artificial Sequence
  human ApoB siRNA sequence
acttcctttcgagttaaggaaac

SEQ ID NO: 13021 - DNA, 23 bp, Artificial Sequence
  human ApoB siRNA sequence
cttcctttcgagttaaggaaaca

SEQ ID NO: 13022 - DNA, 23 bp, Artificial Sequence
  human ApoB siRNA sequence
ttcctttcgagttaaggaaacat

SEQ ID NO: 13023 - DNA, 23 bp, Artificial Sequence
  human ApoB siRNA sequence
tcctttcgagttaaggaaacata

SEQ ID NO: 13024 - DNA, 23 bp, Artificial Sequence
  human ApoB siRNA sequence
cctttcgagttaaggaaacataa

SEQ ID NO: 13025 - DNA, 23 bp, Artificial Sequence
  human ApoB siRNA sequence
ctttcgagttaaggaaacataaa

SEQ ID NO: 13026 - DNA, 23 bp, Artificial Sequence
  human ApoB siRNA sequence
tttcgagttaaggaaacataaac

SEQ ID NO: 13027 - DNA, 23 bp, Artificial Sequence
  human ApoB siRNA sequence
ttcgagttaaggaaacataaact

SEQ ID NO: 13028 - DNA, 23 bp, Artificial Sequence
  human ApoB siRNA sequence
tcgagttaaggaaacataaacta

SEQ ID NO: 13029 - DNA, 23 bp, Artificial Sequence
  human ApoB siRNA sequence
cgagttaaggaaacataaactaa

SEQ ID NO: 13030 - DNA, 23 bp, Artificial Sequence
  human ApoB siRNA sequence
gagttaaggaaacataaactaat

SEQ ID NO: 13031 - DNA, 23 bp, Artificial Sequence
  human ApoB siRNA sequence
agttaaggaaacataaactaata

SEQ ID NO: 13032 - DNA, 23 bp, Artificial Sequence
  human ApoB siRNA sequence
gttaaggaaacataaactaatag

SEQ ID NO: 13033 - DNA, 23 bp, Artificial Sequence
  human ApoB siRNA sequence
ttaaggaaacataaactaataga

SEQ ID NO: 13034 - DNA, 23 bp, Artificial Sequence
  human ApoB siRNA sequence
taaggaaacataaactaatagat

SEQ ID NO: 13035 - DNA, 23 bp, Artificial Sequence
  human ApoB siRNA sequence
aaggaaacataaactaatagatg

SEQ ID NO: 13036 - DNA, 23 bp, Artificial Sequence
  human ApoB siRNA sequence
aggaaacataaactaatagatgt

SEQ ID NO: 13037 - DNA, 23 bp, Artificial Sequence
  human ApoB siRNA sequence
ggaaacataaactaatagatgta

SEQ ID NO: 13038 - DNA, 23 bp, Artificial Sequence
  human ApoB siRNA sequence
gaaacataaactaatagatgtaa

SEQ ID NO: 13039 - DNA, 23 bp, Artificial Sequence
  human ApoB siRNA sequence
aaacataaactaatagatgtaat

SEQ ID NO: 13040 - DNA, 23 bp, Artificial Sequence
  human ApoB siRNA sequence
aacataaactaatagatgtaatc

SEQ ID NO: 13041 - DNA, 23 bp, Artificial Sequence
  human ApoB siRNA sequence
acataaactaatagatgtaatct

SEQ ID NO: 13042 - DNA, 23 bp, Artificial Sequence
  human ApoB siRNA sequence
cataaactaatagatgtaatctc

SEQ ID NO: 13043 - DNA, 23 bp, Artificial Sequence
  human ApoB siRNA sequence
ataaactaatagatgtaatctcg

SEQ ID NO: 13044 - DNA, 23 bp, Artificial Sequence
  human ApoB siRNA sequence
taaactaatagatgtaatctcga

SEQ ID NO: 13045 - DNA, 23 bp, Artificial Sequence
  human ApoB siRNA sequence
aaactaatagatgtaatctcgat

SEQ ID NO: 13046 - DNA, 23 bp, Artificial Sequence
  human ApoB siRNA sequence
aactaatagatgtaatctcgatg

SEQ ID NO: 13047 - DNA, 23 bp, Artificial Sequence
  human ApoB siRNA sequence
actaatagatgtaatctcgatgt

SEQ ID NO: 13048 - DNA, 23 bp, Artificial Sequence
  human ApoB siRNA sequence
ctaatagatgtaatctcgatgta

SEQ ID NO: 13049 - DNA, 23 bp, Artificial Sequence
  human ApoB siRNA sequence
taatagatgtaatctcgatgtat

SEQ ID NO: 13050 - DNA, 23 bp, Artificial Sequence
  human ApoB siRNA sequence
aatagatgtaatctcgatgtata

SEQ ID NO: 13051 - DNA, 23 bp, Artificial Sequence
  human ApoB siRNA sequence
atagatgtaatctcgatgtatag

SEQ ID NO: 13052 - DNA, 23 bp, Artificial Sequence
  human ApoB siRNA sequence
tagatgtaatctcgatgtatagg

SEQ ID NO: 13053 - DNA, 23 bp, Artificial Sequence
  human ApoB siRNA sequence
agatgtaatctcgatgtataggg

SEQ ID NO: 13054 - DNA, 23 bp, Artificial Sequence
  human ApoB siRNA sequence
gatgtaatctcgatgtataggga

SEQ ID NO: 13055 - DNA, 23 bp, Artificial Sequence
  human ApoB siRNA sequence
atgtaatctcgatgtatagggaa

SEQ ID NO: 13056 - DNA, 23 bp, Artificial Sequence
  human ApoB siRNA sequence
tgtaatctcgatgtatagggaac

SEQ ID NO: 13057 - DNA, 23 bp, Artificial Sequence
  human ApoB siRNA sequence
gtaatctcgatgtatagggaact

SEQ ID NO: 13058 - DNA, 23 bp, Artificial Sequence
  human ApoB siRNA sequence
taatctcgatgtatagggaactg

SEQ ID NO: 13059 - DNA, 23 bp, Artificial Sequence
  human ApoB siRNA sequence
aatctcgatgtatagggaactgt

SEQ ID NO: 13060 - DNA, 23 bp, Artificial Sequence
  human ApoB siRNA sequence
atctcgatgtatagggaactgtt

SEQ ID NO: 13061 - DNA, 23 bp, Artificial Sequence
  human ApoB siRNA sequence
tctcgatgtatagggaactgttg

SEQ ID NO: 13062 - DNA, 23 bp, Artificial Sequence
  human ApoB siRNA sequence
ctcgatgtatagggaactgttga

SEQ ID NO: 13063 - DNA, 23 bp, Artificial Sequence
  human ApoB siRNA sequence
tcgatgtatagggaactgttgaa

SEQ ID NO: 13064 - DNA, 23 bp, Artificial Sequence
  human ApoB siRNA sequence
cgatgtatagggaactgttgaaa

SEQ ID NO: 13065 - DNA, 23 bp, Artificial Sequence
  human ApoB siRNA sequence
gatgtatagggaactgttgaaag

SEQ ID NO: 13066 - DNA, 23 bp, Artificial Sequence
  human ApoB siRNA sequence
atgtatagggaactgttgaaaga

SEQ ID NO: 13067 - DNA, 23 bp, Artificial Sequence
  human ApoB siRNA sequence
tgtatagggaactgttgaaagat

SEQ ID NO: 13068 - DNA, 23 bp, Artificial Sequence
  human ApoB siRNA sequence
gtatagggaactgttgaaagatt

SEQ ID NO: 13069 - DNA, 23 bp, Artificial Sequence
  human ApoB siRNA sequence
tatagggaactgttgaaagattt

SEQ ID NO: 13070 - DNA, 23 bp, Artificial Sequence
  human ApoB siRNA sequence
atagggaactgttgaaagattta

SEQ ID NO: 13071 - DNA, 23 bp, Artificial Sequence
  human ApoB siRNA sequence
tagggaactgttgaaagatttat

SEQ ID NO: 13072 - DNA, 23 bp, Artificial Sequence
  human ApoB siRNA sequence
agggaactgttgaaagatttatc

SEQ ID NO: 13073 - DNA, 23 bp, Artificial Sequence
  human ApoB siRNA sequence
gggaactgttgaaagatttatca

SEQ ID NO: 13074 - DNA, 23 bp, Artificial Sequence
  human ApoB siRNA sequence
ggaactgttgaaagatttatcaa

SEQ ID NO: 13075 - DNA, 23 bp, Artificial Sequence
  human ApoB siRNA sequence
gaactgttgaaagatttatcaaa

SEQ ID NO: 13076 - DNA, 23 bp, Artificial Sequence
  human ApoB siRNA sequence
aactgttgaaagatttatcaaaa

SEQ ID NO: 13077 - DNA, 23 bp, Artificial Sequence
  human ApoB siRNA sequence
actgttgaaagatttatcaaaag

SEQ ID NO: 13078 - DNA, 23 bp, Artificial Sequence
  human ApoB siRNA sequence
ctgttgaaagatttatcaaaaga

SEQ ID NO: 13079 - DNA, 23 bp, Artificial Sequence
  human ApoB siRNA sequence
tgttgaaagatttatcaaaagaa

SEQ ID NO: 13080 - DNA, 23 bp, Artificial Sequence
  human ApoB siRNA sequence
gttgaaagatttatcaaaagaag

SEQ ID NO: 13081 - DNA, 23 bp, Artificial Sequence
  human ApoB siRNA sequence
ttgaaagatttatcaaaagaagc

SEQ ID NO: 13082 - DNA, 23 bp, Artificial Sequence
  human ApoB siRNA sequence
tgaaagatttatcaaaagaagcc

SEQ ID NO: 13083 - DNA, 23 bp, Artificial Sequence
  human ApoB siRNA sequence
gaaagatttatcaaaagaagccc

SEQ ID NO: 13084 - DNA, 23 bp, Artificial Sequence
  human ApoB siRNA sequence
aaagatttatcaaaagaagccca

SEQ ID NO: 13085 - DNA, 23 bp, Artificial Sequence
  human ApoB siRNA sequence
aagatttatcaaaagaagcccaa

SEQ ID NO: 13086 - DNA, 23 bp, Artificial Sequence
  human ApoB siRNA sequence
agatttatcaaaagaagcccaag

SEQ ID NO: 13087 - DNA, 23 bp, Artificial Sequence
  human ApoB siRNA sequence
gatttatcaaaagaagcccaaga

SEQ ID NO: 13088 - DNA, 23 bp, Artificial Sequence
  human ApoB siRNA sequence
atttatcaaaagaagcccaagag

SEQ ID NO: 13089 - DNA, 23 bp, Artificial Sequence
  human ApoB siRNA sequence
tttatcaaaagaagcccaagagg

SEQ ID NO: 13090 - DNA, 23 bp, Artificial Sequence
  human ApoB siRNA sequence
ttatcaaaagaagcccaagaggt

SEQ ID NO: 13091 - DNA, 23 bp, Artificial Sequence
  human ApoB siRNA sequence
tatcaaaagaagcccaagaggta

SEQ ID NO: 13092 - DNA, 23 bp, Artificial Sequence
  human ApoB siRNA sequence
atcaaaagaagcccaagaggtat

SEQ ID NO: 13093 - DNA, 23 bp, Artificial Sequence
  human ApoB siRNA sequence
tcaaaagaagcccaagaggtatt

SEQ ID NO: 13094 - DNA, 23 bp, Artificial Sequence
  human ApoB siRNA sequence
caaaagaagcccaagaggtattt

SEQ ID NO: 13095 - DNA, 23 bp, Artificial Sequence
  human ApoB siRNA sequence
aaaagaagcccaagaggtattta

SEQ ID NO: 13096 - DNA, 23 bp, Artificial Sequence
  human ApoB siRNA sequence
aaagaagcccaagaggtatttaa

SEQ ID NO: 13097 - DNA, 23 bp, Artificial Sequence
  human ApoB siRNA sequence
aagaagcccaagaggtatttaaa

SEQ ID NO: 13098 - DNA, 23 bp, Artificial Sequence
  human ApoB siRNA sequence
agaagcccaagaggtatttaaag

SEQ ID NO: 13099 - DNA, 23 bp, Artificial Sequence
  human ApoB siRNA sequence
gaagcccaagaggtatttaaagc

SEQ ID NO: 13100 - DNA, 23 bp, Artificial Sequence
  human ApoB siRNA sequence
aagcccaagaggtatttaaagcc

SEQ ID NO: 13101 - DNA, 23 bp, Artificial Sequence
  human ApoB siRNA sequence
agcccaagaggtatttaaagcca

SEQ ID NO: 13102 - DNA, 23 bp, Artificial Sequence
  human ApoB siRNA sequence
gcccaagaggtatttaaagccat

SEQ ID NO: 13103 - DNA, 23 bp, Artificial Sequence
  human ApoB siRNA sequence
cccaagaggtatttaaagccatt

SEQ ID NO: 13104 - DNA, 23 bp, Artificial Sequence
  human ApoB siRNA sequence
ccaagaggtatttaaagccattc

SEQ ID NO: 13105 - DNA, 23 bp, Artificial Sequence
  human ApoB siRNA sequence
caagaggtatttaaagccattca

SEQ ID NO: 13106 - DNA, 23 bp, Artificial Sequence
  human ApoB siRNA sequence
aagaggtatttaaagccattcag

SEQ ID NO: 13107 - DNA, 23 bp, Artificial Sequence
  human ApoB siRNA sequence
agaggtatttaaagccattcagt

SEQ ID NO: 13108 - DNA, 23 bp, Artificial Sequence
  human ApoB siRNA sequence
gaggtatttaaagccattcagtc

SEQ ID NO: 13109 - DNA, 23 bp, Artificial Sequence
  human ApoB siRNA sequence
aggtatttaaagccattcagtct

SEQ ID NO: 13110 - DNA, 23 bp, Artificial Sequence
  human ApoB siRNA sequence
ggtatttaaagccattcagtctc

SEQ ID NO: 13111 - DNA, 23 bp, Artificial Sequence
  human ApoB siRNA sequence
gtatttaaagccattcagtctct

SEQ ID NO: 13112 - DNA, 23 bp, Artificial Sequence
  human ApoB siRNA sequence
tatttaaagccattcagtctctc

SEQ ID NO: 13113 - DNA, 23 bp, Artificial Sequence
  human ApoB siRNA sequence
atttaaagccattcagtctctca

SEQ ID NO: 13114 - DNA, 23 bp, Artificial Sequence
  human ApoB siRNA sequence
tttaaagccattcagtctctcaa

SEQ ID NO: 13115 - DNA, 23 bp, Artificial Sequence
  human ApoB siRNA sequence
ttaaagccattcagtctctcaag

SEQ ID NO: 13116 - DNA, 23 bp, Artificial Sequence
  human ApoB siRNA sequence
taaagccattcagtctctcaaga

SEQ ID NO: 13117 - DNA, 23 bp, Artificial Sequence
  human ApoB siRNA sequence
aaagccattcagtctctcaagac

SEQ ID NO: 13118 - DNA, 23 bp, Artificial Sequence
  human ApoB siRNA sequence
aagccattcagtctctcaagacc

SEQ ID NO: 13119 - DNA, 23 bp, Artificial Sequence
  human ApoB siRNA sequence
agccattcagtctctcaagacca

SEQ ID NO: 13120 - DNA, 23 bp, Artificial Sequence
  human ApoB siRNA sequence
gccattcagtctctcaagaccac

SEQ ID NO: 13121 - DNA, 23 bp, Artificial Sequence
  human ApoB siRNA sequence
ccattcagtctctcaagaccaca

SEQ ID NO: 13122 - DNA, 23 bp, Artificial Sequence
  human ApoB siRNA sequence
cattcagtctctcaagaccacag

SEQ ID NO: 13123 - DNA, 23 bp, Artificial Sequence
  human ApoB siRNA sequence
attcagtctctcaagaccacaga

SEQ ID NO: 13124 - DNA, 23 bp, Artificial Sequence
  human ApoB siRNA sequence
ttcagtctctcaagaccacagag

SEQ ID NO: 13125 - DNA, 23 bp, Artificial Sequence
  human ApoB siRNA sequence
tcagtctctcaagaccacagagg

SEQ ID NO: 13126 - DNA, 23 bp, Artificial Sequence
  human ApoB siRNA sequence
cagtctctcaagaccacagaggt

SEQ ID NO: 13127 - DNA, 23 bp, Artificial Sequence
  human ApoB siRNA sequence
agtctctcaagaccacagaggtg

SEQ ID NO: 13128 - DNA, 23 bp, Artificial Sequence
  human ApoB siRNA sequence
gtctctcaagaccacagaggtgc

SEQ ID NO: 13129 - DNA, 23 bp, Artificial Sequence
  human ApoB siRNA sequence
tctctcaagaccacagaggtgct

SEQ ID NO: 13130 - DNA, 23 bp, Artificial Sequence
  human ApoB siRNA sequence
ctctcaagaccacagaggtgcta

SEQ ID NO: 13131 - DNA, 23 bp, Artificial Sequence
  human ApoB siRNA sequence
tctcaagaccacagaggtgctac

SEQ ID NO: 13132 - DNA, 23 bp, Artificial Sequence
  human ApoB siRNA sequence
ctcaagaccacagaggtgctacg

SEQ ID NO: 13133 - DNA, 23 bp, Artificial Sequence
  human ApoB siRNA sequence
tcaagaccacagaggtgctacgt

SEQ ID NO: 13134 - DNA, 23 bp, Artificial Sequence
  human ApoB siRNA sequence
caagaccacagaggtgctacgta

SEQ ID NO: 13135 - DNA, 23 bp, Artificial Sequence
  human ApoB siRNA sequence
aagaccacagaggtgctacgtaa

SEQ ID NO: 13136 - DNA, 23 bp, Artificial Sequence
  human ApoB siRNA sequence
agaccacagaggtgctacgtaat

SEQ ID NO: 13137 - DNA, 23 bp, Artificial Sequence
  human ApoB siRNA sequence
gaccacagaggtgctacgtaatc

SEQ ID NO: 13138 - DNA, 23 bp, Artificial Sequence
  human ApoB siRNA sequence
accacagaggtgctacgtaatct

SEQ ID NO: 13139 - DNA, 23 bp, Artificial Sequence
  human ApoB siRNA sequence
ccacagaggtgctacgtaatctt

SEQ ID NO: 13140 - DNA, 23 bp, Artificial Sequence
  human ApoB siRNA sequence
cacagaggtgctacgtaatcttc

SEQ ID NO: 13141 - DNA, 23 bp, Artificial Sequence
  human ApoB siRNA sequence
acagaggtgctacgtaatcttca

SEQ ID NO: 13142 - DNA, 23 bp, Artificial Sequence
  human ApoB siRNA sequence
cagaggtgctacgtaatcttcag

SEQ ID NO: 13143 - DNA, 23 bp, Artificial Sequence
  human ApoB siRNA sequence
agaggtgctacgtaatcttcagg

SEQ ID NO: 13144 - DNA, 23 bp, Artificial Sequence
  human ApoB siRNA sequence
gaggtgctacgtaatcttcagga

SEQ ID NO: 13145 - DNA, 23 bp, Artificial Sequence
  human ApoB siRNA sequence
aggtgctacgtaatcttcaggac

SEQ ID NO: 13146 - DNA, 23 bp, Artificial Sequence
  human ApoB siRNA sequence
ggtgctacgtaatcttcaggacc

SEQ ID NO: 13147 - DNA, 23 bp, Artificial Sequence
  human ApoB siRNA sequence
gtgctacgtaatcttcaggacct

SEQ ID NO: 13148 - DNA, 23 bp, Artificial Sequence
  human ApoB siRNA sequence
tgctacgtaatcttcaggacctt

SEQ ID NO: 13149 - DNA, 23 bp, Artificial Sequence
  human ApoB siRNA sequence
gctacgtaatcttcaggaccttt

SEQ ID NO: 13150 - DNA, 23 bp, Artificial Sequence
  human ApoB siRNA sequence
ctacgtaatcttcaggacctttt

SEQ ID NO: 13151 - DNA, 23 bp, Artificial Sequence
  human ApoB siRNA sequence
tacgtaatcttcaggacctttta

SEQ ID NO: 13152 - DNA, 23 bp, Artificial Sequence
  human ApoB siRNA sequence
acgtaatcttcaggaccttttac

SEQ ID NO: 13153 - DNA, 23 bp, Artificial Sequence
  human ApoB siRNA sequence
cgtaatcttcaggaccttttaca

SEQ ID NO: 13154 - DNA, 23 bp, Artificial Sequence
  human ApoB siRNA sequence
gtaatcttcaggaccttttacaa

SEQ ID NO: 13155 - DNA, 23 bp, Artificial Sequence
  human ApoB siRNA sequence
taatcttcaggaccttttacaat

SEQ ID NO: 13156 - DNA, 23 bp, Artificial Sequence
  human ApoB siRNA sequence
aatcttcaggaccttttacaatt

SEQ ID NO: 13157 - DNA, 23 bp, Artificial Sequence
  human ApoB siRNA sequence
atcttcaggaccttttacaattc

SEQ ID NO: 13158 - DNA, 23 bp, Artificial Sequence
  human ApoB siRNA sequence
tcttcaggaccttttacaattca

SEQ ID NO: 13159 - DNA, 23 bp, Artificial Sequence
  human ApoB siRNA sequence
cttcaggaccttttacaattcat

SEQ ID NO: 13160 - DNA, 23 bp, Artificial Sequence
  human ApoB siRNA sequence
ttcaggaccttttacaattcatt

SEQ ID NO: 13161 - DNA, 23 bp, Artificial Sequence
  human ApoB siRNA sequence
tcaggaccttttacaattcattt

SEQ ID NO: 13162 - DNA, 23 bp, Artificial Sequence
  human ApoB siRNA sequence
caggaccttttacaattcatttt

SEQ ID NO: 13163 - DNA, 23 bp, Artificial Sequence
  human ApoB siRNA sequence
aggaccttttacaattcattttc

SEQ ID NO: 13164 - DNA, 23 bp, Artificial Sequence
  human ApoB siRNA sequence
ggaccttttacaattcattttcc

SEQ ID NO: 13165 - DNA, 23 bp, Artificial Sequence
  human ApoB siRNA sequence
gaccttttacaattcattttcca

SEQ ID NO: 13166 - DNA, 23 bp, Artificial Sequence
  human ApoB siRNA sequence
accttttacaattcattttccaa

SEQ ID NO: 13167 - DNA, 23 bp, Artificial Sequence
  human ApoB siRNA sequence
ccttttacaattcattttccaac

SEQ ID NO: 13168 - DNA, 23 bp, Artificial Sequence
  human ApoB siRNA sequence
cttttacaattcattttccaact

SEQ ID NO: 13169 - DNA, 23 bp, Artificial Sequence
  human ApoB siRNA sequence
ttttacaattcattttccaacta

SEQ ID NO: 13170 - DNA, 23 bp, Artificial Sequence
  human ApoB siRNA sequence
tttacaattcattttccaactaa

SEQ ID NO: 13171 - DNA, 23 bp, Artificial Sequence
  human ApoB siRNA sequence
ttacaattcattttccaactaat

SEQ ID NO: 13172 - DNA, 23 bp, Artificial Sequence
  human ApoB siRNA sequence
tacaattcattttccaactaata

SEQ ID NO: 13173 - DNA, 23 bp, Artificial Sequence
  human ApoB siRNA sequence
acaattcattttccaactaatag

SEQ ID NO: 13174 - DNA, 23 bp, Artificial Sequence
  human ApoB siRNA sequence
caattcattttccaactaataga

SEQ ID NO: 13175 - DNA, 23 bp, Artificial Sequence
  human ApoB siRNA sequence
aattcattttccaactaatagaa

SEQ ID NO: 13176 - DNA, 23 bp, Artificial Sequence
  human ApoB siRNA sequence
attcattttccaactaatagaag

SEQ ID NO: 13177 - DNA, 23 bp, Artificial Sequence
  human ApoB siRNA sequence
ttcattttccaactaatagaaga

SEQ ID NO: 13178 - DNA, 23 bp, Artificial Sequence
  human ApoB siRNA sequence
tcattttccaactaatagaagat

SEQ ID NO: 13179 - DNA, 23 bp, Artificial Sequence
  human ApoB siRNA sequence
cattttccaactaatagaagata

SEQ ID NO: 13180 - DNA, 23 bp, Artificial Sequence
  human ApoB siRNA sequence
attttccaactaatagaagataa

SEQ ID NO: 13181 - DNA, 23 bp, Artificial Sequence
  human ApoB siRNA sequence
ttttccaactaatagaagataac

SEQ ID NO: 13182 - DNA, 23 bp, Artificial Sequence
  human ApoB siRNA sequence
tttccaactaatagaagataaca

SEQ ID NO: 13183 - DNA, 23 bp, Artificial Sequence
  human ApoB siRNA sequence
ttccaactaatagaagataacat

SEQ ID NO: 13184 - DNA, 23 bp, Artificial Sequence
  human ApoB siRNA sequence
tccaactaatagaagataacatt

SEQ ID NO: 13185 - DNA, 23 bp, Artificial Sequence
  human ApoB siRNA sequence
ccaactaatagaagataacatta

SEQ ID NO: 13186 - DNA, 23 bp, Artificial Sequence
  human ApoB siRNA sequence
caactaatagaagataacattaa

SEQ ID NO: 13187 - DNA, 23 bp, Artificial Sequence
  human ApoB siRNA sequence
aactaatagaagataacattaaa

SEQ ID NO: 13188 - DNA, 23 bp, Artificial Sequence
  human ApoB siRNA sequence
actaatagaagataacattaaac

SEQ ID NO: 13189 - DNA, 23 bp, Artificial Sequence
  human ApoB siRNA sequence
ctaatagaagataacattaaaca

SEQ ID NO: 13190 - DNA, 23 bp, Artificial Sequence
  human ApoB siRNA sequence
taatagaagataacattaaacag

SEQ ID NO: 13191 - DNA, 23 bp, Artificial Sequence
  human ApoB siRNA sequence
aatagaagataacattaaacagc

SEQ ID NO: 13192 - DNA, 23 bp, Artificial Sequence
  human ApoB siRNA sequence
atagaagataacattaaacagct

SEQ ID NO: 13193 - DNA, 23 bp, Artificial Sequence
  human ApoB siRNA sequence
tagaagataacattaaacagctg

SEQ ID NO: 13194 - DNA, 23 bp, Artificial Sequence
  human ApoB siRNA sequence
agaagataacattaaacagctga

SEQ ID NO: 13195 - DNA, 23 bp, Artificial Sequence
  human ApoB siRNA sequence
gaagataacattaaacagctgaa

SEQ ID NO: 13196 - DNA, 23 bp, Artificial Sequence
  human ApoB siRNA sequence
aagataacattaaacagctgaaa

SEQ ID NO: 13197 - DNA, 23 bp, Artificial Sequence
  human ApoB siRNA sequence
agataacattaaacagctgaaag

SEQ ID NO: 13198 - DNA, 23 bp, Artificial Sequence
  human ApoB siRNA sequence
gataacattaaacagctgaaaga

SEQ ID NO: 13199 - DNA, 23 bp, Artificial Sequence
  human ApoB siRNA sequence
ataacattaaacagctgaaagag

SEQ ID NO: 13200 - DNA, 23 bp, Artificial Sequence
  human ApoB siRNA sequence
taacattaaacagctgaaagaga

SEQ ID NO: 13201 - DNA, 23 bp, Artificial Sequence
  human ApoB siRNA sequence
aacattaaacagctgaaagagat

SEQ ID NO: 13202 - DNA, 23 bp, Artificial Sequence
  human ApoB siRNA sequence
acattaaacagctgaaagagatg

SEQ ID NO: 13203 - DNA, 23 bp, Artificial Sequence
  human ApoB siRNA sequence
cattaaacagctgaaagagatga

SEQ ID NO: 13204 - DNA, 23 bp, Artificial Sequence
  human ApoB siRNA sequence
attaaacagctgaaagagatgaa

SEQ ID NO: 13205 - DNA, 23 bp, Artificial Sequence
  human ApoB siRNA sequence
ttaaacagctgaaagagatgaaa

SEQ ID NO: 13206 - DNA, 23 bp, Artificial Sequence
  human ApoB siRNA sequence
taaacagctgaaagagatgaaat

SEQ ID NO: 13207 - DNA, 23 bp, Artificial Sequence
  human ApoB siRNA sequence
aaacagctgaaagagatgaaatt

SEQ ID NO: 13208 - DNA, 23 bp, Artificial Sequence
  human ApoB siRNA sequence
aacagctgaaagagatgaaattt

SEQ ID NO: 13209 - DNA, 23 bp, Artificial Sequence
  human ApoB siRNA sequence
acagctgaaagagatgaaattta

SEQ ID NO: 13210 - DNA, 23 bp, Artificial Sequence
  human ApoB siRNA sequence
cagctgaaagagatgaaatttac

SEQ ID NO: 13211 - DNA, 23 bp, Artificial Sequence
  human ApoB siRNA sequence
agctgaaagagatgaaatttact

SEQ ID NO: 13212 - DNA, 23 bp, Artificial Sequence
  human ApoB siRNA sequence
gctgaaagagatgaaatttactt

SEQ ID NO: 13213 - DNA, 23 bp, Artificial Sequence
  human ApoB siRNA sequence
ctgaaagagatgaaatttactta

SEQ ID NO: 13214 - DNA, 23 bp, Artificial Sequence
  human ApoB siRNA sequence
tgaaagagatgaaatttacttat

SEQ ID NO: 13215 - DNA, 23 bp, Artificial Sequence
  human ApoB siRNA sequence
gaaagagatgaaatttacttatc

SEQ ID NO: 13216 - DNA, 23 bp, Artificial Sequence
  human ApoB siRNA sequence
aaagagatgaaatttacttatct

SEQ ID NO: 13217 - DNA, 23 bp, Artificial Sequence
  human ApoB siRNA sequence
aagagatgaaatttacttatctt

SEQ ID NO: 13218 - DNA, 23 bp, Artificial Sequence
  human ApoB siRNA sequence
agagatgaaatttacttatctta

SEQ ID NO: 13219 - DNA, 23 bp, Artificial Sequence
  human ApoB siRNA sequence
gagatgaaatttacttatcttat

SEQ ID NO: 13220 - DNA, 23 bp, Artificial Sequence
  human ApoB siRNA sequence
agatgaaatttacttatcttatt

SEQ ID NO: 13221 - DNA, 23 bp, Artificial Sequence
  human ApoB siRNA sequence
gatgaaatttacttatcttatta

SEQ ID NO: 13222 - DNA, 23 bp, Artificial Sequence
  human ApoB siRNA sequence
atgaaatttacttatcttattaa

SEQ ID NO: 13223 - DNA, 23 bp, Artificial Sequence
  human ApoB siRNA sequence
tgaaatttacttatcttattaat

SEQ ID NO: 13224 - DNA, 23 bp, Artificial Sequence
  human ApoB siRNA sequence
gaaatttacttatcttattaatt

SEQ ID NO: 13225 - DNA, 23 bp, Artificial Sequence
  human ApoB siRNA sequence
aaatttacttatcttattaatta

SEQ ID NO: 13226 - DNA, 23 bp, Artificial Sequence
  human ApoB siRNA sequence
aatttacttatcttattaattat

SEQ ID NO: 13227 - DNA, 23 bp, Artificial Sequence
  human ApoB siRNA sequence
atttacttatcttattaattata

SEQ ID NO: 13228 - DNA, 23 bp, Artificial Sequence
  human ApoB siRNA sequence
tttacttatcttattaattatat

SEQ ID NO: 13229 - DNA, 23 bp, Artificial Sequence
  human ApoB siRNA sequence
ttacttatcttattaattatatc

SEQ ID NO: 13230 - DNA, 23 bp, Artificial Sequence
  human ApoB siRNA sequence
tacttatcttattaattatatcc

SEQ ID NO: 13231 - DNA, 23 bp, Artificial Sequence
  human ApoB siRNA sequence
acttatcttattaattatatcca

SEQ ID NO: 13232 - DNA, 23 bp, Artificial Sequence
  human ApoB siRNA sequence
cttatcttattaattatatccaa

SEQ ID NO: 13233 - DNA, 23 bp, Artificial Sequence
  human ApoB siRNA sequence
ttatcttattaattatatccaag

SEQ ID NO: 13234 - DNA, 23 bp, Artificial Sequence
  human ApoB siRNA sequence
tatcttattaattatatccaaga

SEQ ID NO: 13235 - DNA, 23 bp, Artificial Sequence
  human ApoB siRNA sequence
atcttattaattatatccaagat

SEQ ID NO: 13236 - DNA, 23 bp, Artificial Sequence
  human ApoB siRNA sequence
tcttattaattatatccaagatg

SEQ ID NO: 13237 - DNA, 23 bp, Artificial Sequence
  human ApoB siRNA sequence
cttattaattatatccaagatga

SEQ ID NO: 13238 - DNA, 23 bp, Artificial Sequence
  human ApoB siRNA sequence
ttattaattatatccaagatgag

SEQ ID NO: 13239 - DNA, 23 bp, Artificial Sequence
  human ApoB siRNA sequence
tattaattatatccaagatgaga

SEQ ID NO: 13240 - DNA, 23 bp, Artificial Sequence
  human ApoB siRNA sequence
attaattatatccaagatgagat

SEQ ID NO: 13241 - DNA, 23 bp, Artificial Sequence
  human ApoB siRNA sequence
ttaattatatccaagatgagatc

SEQ ID NO: 13242 - DNA, 23 bp, Artificial Sequence
  human ApoB siRNA sequence
taattatatccaagatgagatca

SEQ ID NO: 13243 - DNA, 23 bp, Artificial Sequence
  human ApoB siRNA sequence
aattatatccaagatgagatcaa

SEQ ID NO: 13244 - DNA, 23 bp, Artificial Sequence
  human ApoB siRNA sequence
attatatccaagatgagatcaac

SEQ ID NO: 13245 - DNA, 23 bp, Artificial Sequence
  human ApoB siRNA sequence
ttatatccaagatgagatcaaca

SEQ ID NO: 13246 - DNA, 23 bp, Artificial Sequence
  human ApoB siRNA sequence
tatatccaagatgagatcaacac

SEQ ID NO: 13247 - DNA, 23 bp, Artificial Sequence
  human ApoB siRNA sequence
atatccaagatgagatcaacaca

SEQ ID NO: 13248 - DNA, 23 bp, Artificial Sequence
  human ApoB siRNA sequence
tatccaagatgagatcaacacaa

SEQ ID NO: 13249 - DNA, 23 bp, Artificial Sequence
  human ApoB siRNA sequence
atccaagatgagatcaacacaat

SEQ ID NO: 13250 - DNA, 23 bp, Artificial Sequence
  human ApoB siRNA sequence
tccaagatgagatcaacacaatc

SEQ ID NO: 13251 - DNA, 23 bp, Artificial Sequence
  human ApoB siRNA sequence
ccaagatgagatcaacacaatct

SEQ ID NO: 13252 - DNA, 23 bp, Artificial Sequence
  human ApoB siRNA sequence
caagatgagatcaacacaatctt

SEQ ID NO: 13253 - DNA, 23 bp, Artificial Sequence
  human ApoB siRNA sequence
aagatgagatcaacacaatcttc

SEQ ID NO: 13254 - DNA, 23 bp, Artificial Sequence
  human ApoB siRNA sequence
agatgagatcaacacaatcttca

SEQ ID NO: 13255 - DNA, 23 bp, Artificial Sequence
  human ApoB siRNA sequence
gatgagatcaacacaatcttcaa

SEQ ID NO: 13256 - DNA, 23 bp, Artificial Sequence
  human ApoB siRNA sequence
atgagatcaacacaatcttcaat

SEQ ID NO: 13257 - DNA, 23 bp, Artificial Sequence
  human ApoB siRNA sequence
tgagatcaacacaatcttcaatg

SEQ ID NO: 13258 - DNA, 23 bp, Artificial Sequence
  human ApoB siRNA sequence
gagatcaacacaatcttcaatga

SEQ ID NO: 13259 - DNA, 23 bp, Artificial Sequence
  human ApoB siRNA sequence
agatcaacacaatcttcaatgat

SEQ ID NO: 13260 - DNA, 23 bp, Artificial Sequence
  human ApoB siRNA sequence
gatcaacacaatcttcaatgatt

SEQ ID NO: 13261 - DNA, 23 bp, Artificial Sequence
  human ApoB siRNA sequence
atcaacacaatcttcaatgatta

SEQ ID NO: 13262 - DNA, 23 bp, Artificial Sequence
  human ApoB siRNA sequence
tcaacacaatcttcaatgattat

SEQ ID NO: 13263 - DNA, 23 bp, Artificial Sequence
  human ApoB siRNA sequence
caacacaatcttcaatgattata

SEQ ID NO: 13264 - DNA, 23 bp, Artificial Sequence
  human ApoB siRNA sequence
aacacaatcttcaatgattatat

SEQ ID NO: 13265 - DNA, 23 bp, Artificial Sequence
  human ApoB siRNA sequence
acacaatcttcaatgattatatc

SEQ ID NO: 13266 - DNA, 23 bp, Artificial Sequence
  human ApoB siRNA sequence
cacaatcttcaatgattatatcc

SEQ ID NO: 13267 - DNA, 23 bp, Artificial Sequence
  human ApoB siRNA sequence
acaatcttcaatgattatatccc

SEQ ID NO: 13268 - DNA, 23 bp, Artificial Sequence
  human ApoB siRNA sequence
caatcttcaatgattatatccca

SEQ ID NO: 13269 - DNA, 23 bp, Artificial Sequence
  human ApoB siRNA sequence
aatcttcaatgattatatcccat

SEQ ID NO: 13270 - DNA, 23 bp, Artificial Sequence
  human ApoB siRNA sequence
atcttcaatgattatatcccata

SEQ ID NO: 13271 - DNA, 23 bp, Artificial Sequence
  human ApoB siRNA sequence
tcttcaatgattatatcccatat

SEQ ID NO: 13272 - DNA, 23 bp, Artificial Sequence
  human ApoB siRNA sequence
cttcaatgattatatcccatatg

SEQ ID NO: 13273 - DNA, 23 bp, Artificial Sequence
  human ApoB siRNA sequence
ttcaatgattatatcccatatgt

SEQ ID NO: 13274 - DNA, 23 bp, Artificial Sequence
  human ApoB siRNA sequence
tcaatgattatatcccatatgtt

SEQ ID NO: 13275 - DNA, 23 bp, Artificial Sequence
  human ApoB siRNA sequence
caatgattatatcccatatgttt

SEQ ID NO: 13276 - DNA, 23 bp, Artificial Sequence
  human ApoB siRNA sequence
aatgattatatcccatatgtttt

SEQ ID NO: 13277 - DNA, 23 bp, Artificial Sequence
  human ApoB siRNA sequence
atgattatatcccatatgttttt

SEQ ID NO: 13278 - DNA, 23 bp, Artificial Sequence
  human ApoB siRNA sequence
tgattatatcccatatgttttta

SEQ ID NO: 13279 - DNA, 23 bp, Artificial Sequence
  human ApoB siRNA sequence
gattatatcccatatgtttttaa

SEQ ID NO: 13280 - DNA, 23 bp, Artificial Sequence
  human ApoB siRNA sequence
attatatcccatatgtttttaaa

SEQ ID NO: 13281 - DNA, 23 bp, Artificial Sequence
  human ApoB siRNA sequence
ttatatcccatatgtttttaaat

SEQ ID NO: 13282 - DNA, 23 bp, Artificial Sequence
  human ApoB siRNA sequence
tatatcccatatgtttttaaatt

SEQ ID NO: 13283 - DNA, 23 bp, Artificial Sequence
  human ApoB siRNA sequence
atatcccatatgtttttaaattg

SEQ ID NO: 13284 - DNA, 23 bp, Artificial Sequence
  human ApoB siRNA sequence
tatcccatatgtttttaaattgt

SEQ ID NO: 13285 - DNA, 23 bp, Artificial Sequence
  human ApoB siRNA sequence
atcccatatgtttttaaattgtt

SEQ ID NO: 13286 - DNA, 23 bp, Artificial Sequence
  human ApoB siRNA sequence
tcccatatgtttttaaattgttg

SEQ ID NO: 13287 - DNA, 23 bp, Artificial Sequence
  human ApoB siRNA sequence
cccatatgtttttaaattgttga

SEQ ID NO: 13288 - DNA, 23 bp, Artificial Sequence
  human ApoB siRNA sequence
ccatatgtttttaaattgttgaa

SEQ ID NO: 13289 - DNA, 23 bp, Artificial Sequence
  human ApoB siRNA sequence
catatgtttttaaattgttgaaa

SEQ ID NO: 13290 - DNA, 23 bp, Artificial Sequence
  human ApoB siRNA sequence
atatgtttttaaattgttgaaag

SEQ ID NO: 13291 - DNA, 23 bp, Artificial Sequence
  human ApoB siRNA sequence
tatgtttttaaattgttgaaaga

SEQ ID NO: 13292 - DNA, 23 bp, Artificial Sequence
  human ApoB siRNA sequence
atgtttttaaattgttgaaagaa

SEQ ID NO: 13293 - DNA, 23 bp, Artificial Sequence
  human ApoB siRNA sequence
tgtttttaaattgttgaaagaaa

SEQ ID NO: 13294 - DNA, 23 bp, Artificial Sequence
  human ApoB siRNA sequence
gtttttaaattgttgaaagaaaa

SEQ ID NO: 13295 - DNA, 23 bp, Artificial Sequence
  human ApoB siRNA sequence
tttttaaattgttgaaagaaaac

SEQ ID NO: 13296 - DNA, 23 bp, Artificial Sequence
  human ApoB siRNA sequence
ttttaaattgttgaaagaaaacc

SEQ ID NO: 13297 - DNA, 23 bp, Artificial Sequence
  human ApoB siRNA sequence
tttaaattgttgaaagaaaacct

SEQ ID NO: 13298 - DNA, 23 bp, Artificial Sequence
  human ApoB siRNA sequence
ttaaattgttgaaagaaaaccta

SEQ ID NO: 13299 - DNA, 23 bp, Artificial Sequence
  human ApoB siRNA sequence
taaattgttgaaagaaaacctat

SEQ ID NO: 13300 - DNA, 23 bp, Artificial Sequence
  human ApoB siRNA sequence
aaattgttgaaagaaaacctatg

SEQ ID NO: 13301 - DNA, 23 bp, Artificial Sequence
  human ApoB siRNA sequence
aattgttgaaagaaaacctatgc

SEQ ID NO: 13302 - DNA, 23 bp, Artificial Sequence
  human ApoB siRNA sequence
attgttgaaagaaaacctatgcc

SEQ ID NO: 13303 - DNA, 23 bp, Artificial Sequence
  human ApoB siRNA sequence
ttgttgaaagaaaacctatgcct

SEQ ID NO: 13304 - DNA, 23 bp, Artificial Sequence
  human ApoB siRNA sequence
tgttgaaagaaaacctatgcctt

SEQ ID NO: 13305 - DNA, 23 bp, Artificial Sequence
  human ApoB siRNA sequence
gttgaaagaaaacctatgcctta

SEQ ID NO: 13306 - DNA, 23 bp, Artificial Sequence
  human ApoB siRNA sequence
ttgaaagaaaacctatgccttaa

SEQ ID NO: 13307 - DNA, 23 bp, Artificial Sequence
  human ApoB siRNA sequence
tgaaagaaaacctatgccttaat

SEQ ID NO: 13308 - DNA, 23 bp, Artificial Sequence
  human ApoB siRNA sequence
gaaagaaaacctatgccttaatc

SEQ ID NO: 13309 - DNA, 23 bp, Artificial Sequence
  human ApoB siRNA sequence
aaagaaaacctatgccttaatct

SEQ ID NO: 13310 - DNA, 23 bp, Artificial Sequence
  human ApoB siRNA sequence
aagaaaacctatgccttaatctt

SEQ ID NO: 13311 - DNA, 23 bp, Artificial Sequence
  human ApoB siRNA sequence
agaaaacctatgccttaatcttc

SEQ ID NO: 13312 - DNA, 23 bp, Artificial Sequence
  human ApoB siRNA sequence
gaaaacctatgccttaatcttca

SEQ ID NO: 13313 - DNA, 23 bp, Artificial Sequence
  human ApoB siRNA sequence
aaaacctatgccttaatcttcat

SEQ ID NO: 13314 - DNA, 23 bp, Artificial Sequence
  human ApoB siRNA sequence
aaacctatgccttaatcttcata

SEQ ID NO: 13315 - DNA, 23 bp, Artificial Sequence
  human ApoB siRNA sequence
aacctatgccttaatcttcataa

SEQ ID NO: 13316 - DNA, 23 bp, Artificial Sequence
  human ApoB siRNA sequence
acctatgccttaatcttcataag

SEQ ID NO: 13317 - DNA, 23 bp, Artificial Sequence
  human ApoB siRNA sequence
cctatgccttaatcttcataagt

SEQ ID NO: 13318 - DNA, 23 bp, Artificial Sequence
  human ApoB siRNA sequence
ctatgccttaatcttcataagtt

SEQ ID NO: 13319 - DNA, 23 bp, Artificial Sequence
  human ApoB siRNA sequence
tatgccttaatcttcataagttc

SEQ ID NO: 13320 - DNA, 23 bp, Artificial Sequence
  human ApoB siRNA sequence
atgccttaatcttcataagttca

SEQ ID NO: 13321 - DNA, 23 bp, Artificial Sequence
  human ApoB siRNA sequence
tgccttaatcttcataagttcaa

SEQ ID NO: 13322 - DNA, 23 bp, Artificial Sequence
  human ApoB siRNA sequence
gccttaatcttcataagttcaat

SEQ ID NO: 13323 - DNA, 23 bp, Artificial Sequence
  human ApoB siRNA sequence
ccttaatcttcataagttcaatg

SEQ ID NO: 13324 - DNA, 23 bp, Artificial Sequence
  human ApoB siRNA sequence
cttaatcttcataagttcaatga

SEQ ID NO: 13325 - DNA, 23 bp, Artificial Sequence
  human ApoB siRNA sequence
ttaatcttcataagttcaatgaa

SEQ ID NO: 13326 - DNA, 23 bp, Artificial Sequence
  human ApoB siRNA sequence
taatcttcataagttcaatgaat

SEQ ID NO: 13327 - DNA, 23 bp, Artificial Sequence
  human ApoB siRNA sequence
aatcttcataagttcaatgaatt

SEQ ID NO: 13328 - DNA, 23 bp, Artificial Sequence
  human ApoB siRNA sequence
atcttcataagttcaatgaattt

SEQ ID NO: 13329 - DNA, 23 bp, Artificial Sequence
  human ApoB siRNA sequence
tcttcataagttcaatgaattta

SEQ ID NO: 13330 - DNA, 23 bp, Artificial Sequence
  human ApoB siRNA sequence
cttcataagttcaatgaatttat

SEQ ID NO: 13331 - DNA, 23 bp, Artificial Sequence
  human ApoB siRNA sequence
ttcataagttcaatgaatttatt

SEQ ID NO: 13332 - DNA, 23 bp, Artificial Sequence
  human ApoB siRNA sequence
tcataagttcaatgaatttattc

SEQ ID NO: 13333 - DNA, 23 bp, Artificial Sequence
  human ApoB siRNA sequence
cataagttcaatgaatttattca

SEQ ID NO: 13334 - DNA, 23 bp, Artificial Sequence
  human ApoB siRNA sequence
ataagttcaatgaatttattcaa

SEQ ID NO: 13335 - DNA, 23 bp, Artificial Sequence
  human ApoB siRNA sequence
taagttcaatgaatttattcaaa

SEQ ID NO: 13336 - DNA, 23 bp, Artificial Sequence
  human ApoB siRNA sequence
aagttcaatgaatttattcaaaa

SEQ ID NO: 13337 - DNA, 23 bp, Artificial Sequence
  human ApoB siRNA sequence
agttcaatgaatttattcaaaac

SEQ ID NO: 13338 - DNA, 23 bp, Artificial Sequence
  human ApoB siRNA sequence
gttcaatgaatttattcaaaacg

SEQ ID NO: 13339 - DNA, 23 bp, Artificial Sequence
  human ApoB siRNA sequence
ttcaatgaatttattcaaaacga

SEQ ID NO: 13340 - DNA, 23 bp, Artificial Sequence
  human ApoB siRNA sequence
tcaatgaatttattcaaaacgag

SEQ ID NO: 13341 - DNA, 23 bp, Artificial Sequence
  human ApoB siRNA sequence
caatgaatttattcaaaacgagc

SEQ ID NO: 13342 - DNA, 23 bp, Artificial Sequence
  human ApoB siRNA sequence
aatgaatttattcaaaacgagct

SEQ ID NO: 13343 - DNA, 23 bp, Artificial Sequence
  human ApoB siRNA sequence
atgaatttattcaaaacgagctt

SEQ ID NO: 13344 - DNA, 23 bp, Artificial Sequence
  human ApoB siRNA sequence
tgaatttattcaaaacgagcttc

SEQ ID NO: 13345 - DNA, 23 bp, Artificial Sequence
  human ApoB siRNA sequence
gaatttattcaaaacgagcttca

SEQ ID NO: 13346 - DNA, 23 bp, Artificial Sequence
  human ApoB siRNA sequence
aatttattcaaaacgagcttcag

SEQ ID NO: 13347 - DNA, 23 bp, Artificial Sequence
  human ApoB siRNA sequence
atttattcaaaacgagcttcagg

SEQ ID NO: 13348 - DNA, 23 bp, Artificial Sequence
  human ApoB siRNA sequence
tttattcaaaacgagcttcagga

SEQ ID NO: 13349 - DNA, 23 bp, Artificial Sequence
  human ApoB siRNA sequence
ttattcaaaacgagcttcaggaa

SEQ ID NO: 13350 - DNA, 23 bp, Artificial Sequence
  human ApoB siRNA sequence
tattcaaaacgagcttcaggaag

SEQ ID NO: 13351 - DNA, 23 bp, Artificial Sequence
  human ApoB siRNA sequence
attcaaaacgagcttcaggaagc

SEQ ID NO: 13352 - DNA, 23 bp, Artificial Sequence
  human ApoB siRNA sequence
ttcaaaacgagcttcaggaagct

SEQ ID NO: 13353 - DNA, 23 bp, Artificial Sequence
  human ApoB siRNA sequence
tcaaaacgagcttcaggaagctt

SEQ ID NO: 13354 - DNA, 23 bp, Artificial Sequence
  human ApoB siRNA sequence
caaaacgagcttcaggaagcttc

SEQ ID NO: 13355 - DNA, 23 bp, Artificial Sequence
  human ApoB siRNA sequence
aaaacgagcttcaggaagcttct

SEQ ID NO: 13356 - DNA, 23 bp, Artificial Sequence
  human ApoB siRNA sequence
aaacgagcttcaggaagcttctc

SEQ ID NO: 13357 - DNA, 23 bp, Artificial Sequence
  human ApoB siRNA sequence
aacgagcttcaggaagcttctca

SEQ ID NO: 13358 - DNA, 23 bp, Artificial Sequence
  human ApoB siRNA sequence
acgagcttcaggaagcttctcaa

SEQ ID NO: 13359 - DNA, 23 bp, Artificial Sequence
  human ApoB siRNA sequence
cgagcttcaggaagcttctcaag

SEQ ID NO: 13360 - DNA, 23 bp, Artificial Sequence
  human ApoB siRNA sequence
gagcttcaggaagcttctcaaga

SEQ ID NO: 13361 - DNA, 23 bp, Artificial Sequence
  human ApoB siRNA sequence
agcttcaggaagcttctcaagag

SEQ ID NO: 13362 - DNA, 23 bp, Artificial Sequence
  human ApoB siRNA sequence
gcttcaggaagcttctcaagagt

SEQ ID NO: 13363 - DNA, 23 bp, Artificial Sequence
  human ApoB siRNA sequence
cttcaggaagcttctcaagagtt

SEQ ID NO: 13364 - DNA, 23 bp, Artificial Sequence
  human ApoB siRNA sequence
ttcaggaagcttctcaagagtta

SEQ ID NO: 13365 - DNA, 23 bp, Artificial Sequence
  human ApoB siRNA sequence
tcaggaagcttctcaagagttac

SEQ ID NO: 13366 - DNA, 23 bp, Artificial Sequence
  human ApoB siRNA sequence
caggaagcttctcaagagttaca

SEQ ID NO: 13367 - DNA, 23 bp, Artificial Sequence
  human ApoB siRNA sequence
aggaagcttctcaagagttacag

SEQ ID NO: 13368 - DNA, 23 bp, Artificial Sequence
  human ApoB siRNA sequence
ggaagcttctcaagagttacagc

SEQ ID NO: 13369 - DNA, 23 bp, Artificial Sequence
  human ApoB siRNA sequence
gaagcttctcaagagttacagca

SEQ ID NO: 13370 - DNA, 23 bp, Artificial Sequence
  human ApoB siRNA sequence
aagcttctcaagagttacagcag

SEQ ID NO: 13371 - DNA, 23 bp, Artificial Sequence
  human ApoB siRNA sequence
agcttctcaagagttacagcaga

SEQ ID NO: 13372 - DNA, 23 bp, Artificial Sequence
  human ApoB siRNA sequence
gcttctcaagagttacagcagat

SEQ ID NO: 13373 - DNA, 23 bp, Artificial Sequence
  human ApoB siRNA sequence
cttctcaagagttacagcagatc

SEQ ID NO: 13374 - DNA, 23 bp, Artificial Sequence
  human ApoB siRNA sequence
ttctcaagagttacagcagatcc

SEQ ID NO: 13375 - DNA, 23 bp, Artificial Sequence
  human ApoB siRNA sequence
tctcaagagttacagcagatcca

SEQ ID NO: 13376 - DNA, 23 bp, Artificial Sequence
  human ApoB siRNA sequence
ctcaagagttacagcagatccat

SEQ ID NO: 13377 - DNA, 23 bp, Artificial Sequence
  human ApoB siRNA sequence
tcaagagttacagcagatccatc

SEQ ID NO: 13378 - DNA, 23 bp, Artificial Sequence
  human ApoB siRNA sequence
caagagttacagcagatccatca

SEQ ID NO: 13379 - DNA, 23 bp, Artificial Sequence
  human ApoB siRNA sequence
aagagttacagcagatccatcaa

SEQ ID NO: 13380 - DNA, 23 bp, Artificial Sequence
  human ApoB siRNA sequence
agagttacagcagatccatcaat

SEQ ID NO: 13381 - DNA, 23 bp, Artificial Sequence
  human ApoB siRNA sequence
gagttacagcagatccatcaata

SEQ ID NO: 13382 - DNA, 23 bp, Artificial Sequence
  human ApoB siRNA sequence
agttacagcagatccatcaatac

SEQ ID NO: 13383 - DNA, 23 bp, Artificial Sequence
  human ApoB siRNA sequence
gttacagcagatccatcaataca

SEQ ID NO: 13384 - DNA, 23 bp, Artificial Sequence
  human ApoB siRNA sequence
ttacagcagatccatcaatacat

SEQ ID NO: 13385 - DNA, 23 bp, Artificial Sequence
  human ApoB siRNA sequence
tacagcagatccatcaatacatt

SEQ ID NO: 13386 - DNA, 23 bp, Artificial Sequence
  human ApoB siRNA sequence
acagcagatccatcaatacatta

SEQ ID NO: 13387 - DNA, 23 bp, Artificial Sequence
  human ApoB siRNA sequence
cagcagatccatcaatacattat

SEQ ID NO: 13388 - DNA, 23 bp, Artificial Sequence
  human ApoB siRNA sequence
agcagatccatcaatacattatg

SEQ ID NO: 13389 - DNA, 23 bp, Artificial Sequence
  human ApoB siRNA sequence
gcagatccatcaatacattatgg

SEQ ID NO: 13390 - DNA, 23 bp, Artificial Sequence
  human ApoB siRNA sequence
cagatccatcaatacattatggc

SEQ ID NO: 13391 - DNA, 23 bp, Artificial Sequence
  human ApoB siRNA sequence
agatccatcaatacattatggcc

SEQ ID NO: 13392 - DNA, 23 bp, Artificial Sequence
  human ApoB siRNA sequence
gatccatcaatacattatggccc

SEQ ID NO: 13393 - DNA, 23 bp, Artificial Sequence
  human ApoB siRNA sequence
atccatcaatacattatggccct

SEQ ID NO: 13394 - DNA, 23 bp, Artificial Sequence
  human ApoB siRNA sequence
tccatcaatacattatggccctt

SEQ ID NO: 13395 - DNA, 23 bp, Artificial Sequence
  human ApoB siRNA sequence
ccatcaatacattatggcccttc

SEQ ID NO: 13396 - DNA, 23 bp, Artificial Sequence
  human ApoB siRNA sequence
catcaatacattatggcccttcg

SEQ ID NO: 13397 - DNA, 23 bp, Artificial Sequence
  human ApoB siRNA sequence
atcaatacattatggcccttcgt

SEQ ID NO: 13398 - DNA, 23 bp, Artificial Sequence
  human ApoB siRNA sequence
tcaatacattatggcccttcgtg

SEQ ID NO: 13399 - DNA, 23 bp, Artificial Sequence
  human ApoB siRNA sequence
caatacattatggcccttcgtga

SEQ ID NO: 13400 - DNA, 23 bp, Artificial Sequence
  human ApoB siRNA sequence
aatacattatggcccttcgtgaa

SEQ ID NO: 13401 - DNA, 23 bp, Artificial Sequence
  human ApoB siRNA sequence
atacattatggcccttcgtgaag

SEQ ID NO: 13402 - DNA, 23 bp, Artificial Sequence
  human ApoB siRNA sequence
tacattatggcccttcgtgaaga

SEQ ID NO: 13403 - DNA, 23 bp, Artificial Sequence
  human ApoB siRNA sequence
acattatggcccttcgtgaagaa

SEQ ID NO: 13404 - DNA, 23 bp, Artificial Sequence
  human ApoB siRNA sequence
cattatggcccttcgtgaagaat

SEQ ID NO: 13405 - DNA, 23 bp, Artificial Sequence
  human ApoB siRNA sequence
attatggcccttcgtgaagaata

SEQ ID NO: 13406 - DNA, 23 bp, Artificial Sequence
  human ApoB siRNA sequence
ttatggcccttcgtgaagaatat

SEQ ID NO: 13407 - DNA, 23 bp, Artificial Sequence
  human ApoB siRNA sequence
tatggcccttcgtgaagaatatt

SEQ ID NO: 13408 - DNA, 23 bp, Artificial Sequence
  human ApoB siRNA sequence
atggcccttcgtgaagaatattt

SEQ ID NO: 13409 - DNA, 23 bp, Artificial Sequence
  human ApoB siRNA sequence
tggcccttcgtgaagaatatttt

SEQ ID NO: 13410 - DNA, 23 bp, Artificial Sequence
  human ApoB siRNA sequence
ggcccttcgtgaagaatattttg

SEQ ID NO: 13411 - DNA, 23 bp, Artificial Sequence
  human ApoB siRNA sequence
gcccttcgtgaagaatattttga

SEQ ID NO: 13412 - DNA, 23 bp, Artificial Sequence
  human ApoB siRNA sequence
cccttcgtgaagaatattttgat

SEQ ID NO: 13413 - DNA, 23 bp, Artificial Sequence
  human ApoB siRNA sequence
ccttcgtgaagaatattttgatc

SEQ ID NO: 13414 - DNA, 23 bp, Artificial Sequence
  human ApoB siRNA sequence
cttcgtgaagaatattttgatcc

SEQ ID NO: 13415 - DNA, 23 bp, Artificial Sequence
  human ApoB siRNA sequence
ttcgtgaagaatattttgatcca

SEQ ID NO: 13416 - DNA, 23 bp, Artificial Sequence
  human ApoB siRNA sequence
tcgtgaagaatattttgatccaa

SEQ ID NO: 13417 - DNA, 23 bp, Artificial Sequence
  human ApoB siRNA sequence
cgtgaagaatattttgatccaag

SEQ ID NO: 13418 - DNA, 23 bp, Artificial Sequence
  human ApoB siRNA sequence
gtgaagaatattttgatccaagt

SEQ ID NO: 13419 - DNA, 23 bp, Artificial Sequence
  human ApoB siRNA sequence
tgaagaatattttgatccaagta

SEQ ID NO: 13420 - DNA, 23 bp, Artificial Sequence
  human ApoB siRNA sequence
gaagaatattttgatccaagtat

SEQ ID NO: 13421 - DNA, 23 bp, Artificial Sequence
  human ApoB siRNA sequence
aagaatattttgatccaagtata

SEQ ID NO: 13422 - DNA, 23 bp, Artificial Sequence
  human ApoB siRNA sequence
agaatattttgatccaagtatag

SEQ ID NO: 13423 - DNA, 23 bp, Artificial Sequence
  human ApoB siRNA sequence
gaatattttgatccaagtatagt

SEQ ID NO: 13424 - DNA, 23 bp, Artificial Sequence
  human ApoB siRNA sequence
aatattttgatccaagtatagtt

SEQ ID NO: 13425 - DNA, 23 bp, Artificial Sequence
  human ApoB siRNA sequence
atattttgatccaagtatagttg

SEQ ID NO: 13426 - DNA, 23 bp, Artificial Sequence
  human ApoB siRNA sequence
tattttgatccaagtatagttgg

SEQ ID NO: 13427 - DNA, 23 bp, Artificial Sequence
  human ApoB siRNA sequence
attttgatccaagtatagttggc

SEQ ID NO: 13428 - DNA, 23 bp, Artificial Sequence
  human ApoB siRNA sequence
ttttgatccaagtatagttggct

SEQ ID NO: 13429 - DNA, 23 bp, Artificial Sequence
  human ApoB siRNA sequence
tttgatccaagtatagttggctg

SEQ ID NO: 13430 - DNA, 23 bp, Artificial Sequence
  human ApoB siRNA sequence
ttgatccaagtatagttggctgg

SEQ ID NO: 13431 - DNA, 23 bp, Artificial Sequence
  human ApoB siRNA sequence
tgatccaagtatagttggctgga

SEQ ID NO: 13432 - DNA, 23 bp, Artificial Sequence
  human ApoB siRNA sequence
gatccaagtatagttggctggac

SEQ ID NO: 13433 - DNA, 23 bp, Artificial Sequence
  human ApoB siRNA sequence
atccaagtatagttggctggaca

SEQ ID NO: 13434 - DNA, 23 bp, Artificial Sequence
  human ApoB siRNA sequence
tccaagtatagttggctggacag

SEQ ID NO: 13435 - DNA, 23 bp, Artificial Sequence
  human ApoB siRNA sequence
ccaagtatagttggctggacagt

SEQ ID NO: 13436 - DNA, 23 bp, Artificial Sequence
  human ApoB siRNA sequence
caagtatagttggctggacagtg

SEQ ID NO: 13437 - DNA, 23 bp, Artificial Sequence
  human ApoB siRNA sequence
aagtatagttggctggacagtga

SEQ ID NO: 13438 - DNA, 23 bp, Artificial Sequence
  human ApoB siRNA sequence
agtatagttggctggacagtgaa

SEQ ID NO: 13439 - DNA, 23 bp, Artificial Sequence
  human ApoB siRNA sequence
gtatagttggctggacagtgaaa

SEQ ID NO: 13440 - DNA, 23 bp, Artificial Sequence
  human ApoB siRNA sequence
tatagttggctggacagtgaaat

SEQ ID NO: 13441 - DNA, 23 bp, Artificial Sequence
  human ApoB siRNA sequence
atagttggctggacagtgaaata

SEQ ID NO: 13442 - DNA, 23 bp, Artificial Sequence
  human ApoB siRNA sequence
tagttggctggacagtgaaatat

SEQ ID NO: 13443 - DNA, 23 bp, Artificial Sequence
  human ApoB siRNA sequence
agttggctggacagtgaaatatt

SEQ ID NO: 13444 - DNA, 23 bp, Artificial Sequence
  human ApoB siRNA sequence
gttggctggacagtgaaatatta

SEQ ID NO: 13445 - DNA, 23 bp, Artificial Sequence
  human ApoB siRNA sequence
ttggctggacagtgaaatattat

SEQ ID NO: 13446 - DNA, 23 bp, Artificial Sequence
  human ApoB siRNA sequence
tggctggacagtgaaatattatg

SEQ ID NO: 13447 - DNA, 23 bp, Artificial Sequence
  human ApoB siRNA sequence
ggctggacagtgaaatattatga

SEQ ID NO: 13448 - DNA, 23 bp, Artificial Sequence
  human ApoB siRNA sequence
gctggacagtgaaatattatgaa

SEQ ID NO: 13449 - DNA, 23 bp, Artificial Sequence
  human ApoB siRNA sequence
ctggacagtgaaatattatgaac

SEQ ID NO: 13450 - DNA, 23 bp, Artificial Sequence
  human ApoB siRNA sequence
tggacagtgaaatattatgaact

SEQ ID NO: 13451 - DNA, 23 bp, Artificial Sequence
  human ApoB siRNA sequence
ggacagtgaaatattatgaactt

SEQ ID NO: 13452 - DNA, 23 bp, Artificial Sequence
  human ApoB siRNA sequence
gacagtgaaatattatgaacttg

SEQ ID NO: 13453 - DNA, 23 bp, Artificial Sequence
  human ApoB siRNA sequence
acagtgaaatattatgaacttga

SEQ ID NO: 13454 - DNA, 23 bp, Artificial Sequence
  human ApoB siRNA sequence
cagtgaaatattatgaacttgaa

SEQ ID NO: 13455 - DNA, 23 bp, Artificial Sequence
  human ApoB siRNA sequence
agtgaaatattatgaacttgaag

SEQ ID NO: 13456 - DNA, 23 bp, Artificial Sequence
  human ApoB siRNA sequence
gtgaaatattatgaacttgaaga

SEQ ID NO: 13457 - DNA, 23 bp, Artificial Sequence
  human ApoB siRNA sequence
tgaaatattatgaacttgaagaa

SEQ ID NO: 13458 - DNA, 23 bp, Artificial Sequence
  human ApoB siRNA sequence
gaaatattatgaacttgaagaaa

SEQ ID NO: 13459 - DNA, 23 bp, Artificial Sequence
  human ApoB siRNA sequence
aaatattatgaacttgaagaaaa

SEQ ID NO: 13460 - DNA, 23 bp, Artificial Sequence
  human ApoB siRNA sequence
aatattatgaacttgaagaaaag

SEQ ID NO: 13461 - DNA, 23 bp, Artificial Sequence
  human ApoB siRNA sequence
atattatgaacttgaagaaaaga

SEQ ID NO: 13462 - DNA, 23 bp, Artificial Sequence
  human ApoB siRNA sequence
tattatgaacttgaagaaaagat

SEQ ID NO: 13463 - DNA, 23 bp, Artificial Sequence
  human ApoB siRNA sequence
attatgaacttgaagaaaagata

SEQ ID NO: 13464 - DNA, 23 bp, Artificial Sequence
  human ApoB siRNA sequence
ttatgaacttgaagaaaagatag

SEQ ID NO: 13465 - DNA, 23 bp, Artificial Sequence
  human ApoB siRNA sequence
tatgaacttgaagaaaagatagt

SEQ ID NO: 13466 - DNA, 23 bp, Artificial Sequence
  human ApoB siRNA sequence
atgaacttgaagaaaagatagtc

SEQ ID NO: 13467 - DNA, 23 bp, Artificial Sequence
  human ApoB siRNA sequence
tgaacttgaagaaaagatagtca

SEQ ID NO: 13468 - DNA, 23 bp, Artificial Sequence
  human ApoB siRNA sequence
gaacttgaagaaaagatagtcag

SEQ ID NO: 13469 - DNA, 23 bp, Artificial Sequence
  human ApoB siRNA sequence
aacttgaagaaaagatagtcagt

SEQ ID NO: 13470 - DNA, 23 bp, Artificial Sequence
  human ApoB siRNA sequence
acttgaagaaaagatagtcagtc

SEQ ID NO: 13471 - DNA, 23 bp, Artificial Sequence
  human ApoB siRNA sequence
cttgaagaaaagatagtcagtct

SEQ ID NO: 13472 - DNA, 23 bp, Artificial Sequence
  human ApoB siRNA sequence
ttgaagaaaagatagtcagtctg

SEQ ID NO: 13473 - DNA, 23 bp, Artificial Sequence
  human ApoB siRNA sequence
tgaagaaaagatagtcagtctga

SEQ ID NO: 13474 - DNA, 23 bp, Artificial Sequence
  human ApoB siRNA sequence
gaagaaaagatagtcagtctgat

SEQ ID NO: 13475 - DNA, 23 bp, Artificial Sequence
  human ApoB siRNA sequence
aagaaaagatagtcagtctgatc

SEQ ID NO: 13476 - DNA, 23 bp, Artificial Sequence
  human ApoB siRNA sequence
agaaaagatagtcagtctgatca

SEQ ID NO: 13477 - DNA, 23 bp, Artificial Sequence
  human ApoB siRNA sequence
gaaaagatagtcagtctgatcaa

SEQ ID NO: 13478 - DNA, 23 bp, Artificial Sequence
  human ApoB siRNA sequence
aaaagatagtcagtctgatcaag

SEQ ID NO: 13479 - DNA, 23 bp, Artificial Sequence
  human ApoB siRNA sequence
aaagatagtcagtctgatcaaga

SEQ ID NO: 13480 - DNA, 23 bp, Artificial Sequence
  human ApoB siRNA sequence
aagatagtcagtctgatcaagaa

SEQ ID NO: 13481 - DNA, 23 bp, Artificial Sequence
  human ApoB siRNA sequence
agatagtcagtctgatcaagaac

SEQ ID NO: 13482 - DNA, 23 bp, Artificial Sequence
  human ApoB siRNA sequence
gatagtcagtctgatcaagaacc

SEQ ID NO: 13483 - DNA, 23 bp, Artificial Sequence
  human ApoB siRNA sequence
atagtcagtctgatcaagaacct

SEQ ID NO: 13484 - DNA, 23 bp, Artificial Sequence
  human ApoB siRNA sequence
tagtcagtctgatcaagaacctg

SEQ ID NO: 13485 - DNA, 23 bp, Artificial Sequence
  human ApoB siRNA sequence
agtcagtctgatcaagaacctgt

SEQ ID NO: 13486 - DNA, 23 bp, Artificial Sequence
  human ApoB siRNA sequence
gtcagtctgatcaagaacctgtt

SEQ ID NO: 13487 - DNA, 23 bp, Artificial Sequence
  human ApoB siRNA sequence
tcagtctgatcaagaacctgtta

SEQ ID NO: 13488 - DNA, 23 bp, Artificial Sequence
  human ApoB siRNA sequence
cagtctgatcaagaacctgttag

SEQ ID NO: 13489 - DNA, 23 bp, Artificial Sequence
  human ApoB siRNA sequence
agtctgatcaagaacctgttagt

SEQ ID NO: 13490 - DNA, 23 bp, Artificial Sequence
  human ApoB siRNA sequence
gtctgatcaagaacctgttagtt

SEQ ID NO: 13491 - DNA, 23 bp, Artificial Sequence
  human ApoB siRNA sequence
tctgatcaagaacctgttagttg

SEQ ID NO: 13492 - DNA, 23 bp, Artificial Sequence
  human ApoB siRNA sequence
ctgatcaagaacctgttagttgc

SEQ ID NO: 13493 - DNA, 23 bp, Artificial Sequence
  human ApoB siRNA sequence
tgatcaagaacctgttagttgct

SEQ ID NO: 13494 - DNA, 23 bp, Artificial Sequence
  human ApoB siRNA sequence
gatcaagaacctgttagttgctc

SEQ ID NO: 13495 - DNA, 23 bp, Artificial Sequence
  human ApoB siRNA sequence
atcaagaacctgttagttgctct

SEQ ID NO: 13496 - DNA, 23 bp, Artificial Sequence
  human ApoB siRNA sequence
tcaagaacctgttagttgctctt

SEQ ID NO: 13497 - DNA, 23 bp, Artificial Sequence
  human ApoB siRNA sequence
caagaacctgttagttgctctta

SEQ ID NO: 13498 - DNA, 23 bp, Artificial Sequence
  human ApoB siRNA sequence
aagaacctgttagttgctcttaa

SEQ ID NO: 13499 - DNA, 23 bp, Artificial Sequence
  human ApoB siRNA sequence
agaacctgttagttgctcttaag

SEQ ID NO: 13500 - DNA, 23 bp, Artificial Sequence
  human ApoB siRNA sequence
gaacctgttagttgctcttaagg

SEQ ID NO: 13501 - DNA, 23 bp, Artificial Sequence
  human ApoB siRNA sequence
aacctgttagttgctcttaagga

SEQ ID NO: 13502 - DNA, 23 bp, Artificial Sequence
  human ApoB siRNA sequence
acctgttagttgctcttaaggac

SEQ ID NO: 13503 - DNA, 23 bp, Artificial Sequence
  human ApoB siRNA sequence
cctgttagttgctcttaaggact

SEQ ID NO: 13504 - DNA, 23 bp, Artificial Sequence
  human ApoB siRNA sequence
ctgttagttgctcttaaggactt

SEQ ID NO: 13505 - DNA, 23 bp, Artificial Sequence
  human ApoB siRNA sequence
tgttagttgctcttaaggacttc

SEQ ID NO: 13506 - DNA, 23 bp, Artificial Sequence
  human ApoB siRNA sequence
gttagttgctcttaaggacttcc

SEQ ID NO: 13507 - DNA, 23 bp, Artificial Sequence
  human ApoB siRNA sequence
ttagttgctcttaaggacttcca

SEQ ID NO: 13508 - DNA, 23 bp, Artificial Sequence
  human ApoB siRNA sequence
tagttgctcttaaggacttccat

SEQ ID NO: 13509 - DNA, 23 bp, Artificial Sequence
  human ApoB siRNA sequence
agttgctcttaaggacttccatt

SEQ ID NO: 13510 - DNA, 23 bp, Artificial Sequence
  human ApoB siRNA sequence
gttgctcttaaggacttccattc

SEQ ID NO: 13511 - DNA, 23 bp, Artificial Sequence
  human ApoB siRNA sequence
ttgctcttaaggacttccattct

SEQ ID NO: 13512 - DNA, 23 bp, Artificial Sequence
  human ApoB siRNA sequence
tgctcttaaggacttccattctg

SEQ ID NO: 13513 - DNA, 23 bp, Artificial Sequence
  human ApoB siRNA sequence
gctcttaaggacttccattctga

SEQ ID NO: 13514 - DNA, 23 bp, Artificial Sequence
  human ApoB siRNA sequence
ctcttaaggacttccattctgaa

SEQ ID NO: 13515 - DNA, 23 bp, Artificial Sequence
  human ApoB siRNA sequence
tcttaaggacttccattctgaat

SEQ ID NO: 13516 - DNA, 23 bp, Artificial Sequence
  human ApoB siRNA sequence
cttaaggacttccattctgaata

SEQ ID NO: 13517 - DNA, 23 bp, Artificial Sequence
  human ApoB siRNA sequence
ttaaggacttccattctgaatat

SEQ ID NO: 13518 - DNA, 23 bp, Artificial Sequence
  human ApoB siRNA sequence
taaggacttccattctgaatata

SEQ ID NO: 13519 - DNA, 23 bp, Artificial Sequence
  human ApoB siRNA sequence
aaggacttccattctgaatatat

SEQ ID NO: 13520 - DNA, 23 bp, Artificial Sequence
  human ApoB siRNA sequence
aggacttccattctgaatatatt

SEQ ID NO: 13521 - DNA, 23 bp, Artificial Sequence
  human ApoB siRNA sequence
ggacttccattctgaatatattg

SEQ ID NO: 13522 - DNA, 23 bp, Artificial Sequence
  human ApoB siRNA sequence
gacttccattctgaatatattgt

SEQ ID NO: 13523 - DNA, 23 bp, Artificial Sequence
  human ApoB siRNA sequence
acttccattctgaatatattgtc

SEQ ID NO: 13524 - DNA, 23 bp, Artificial Sequence
  human ApoB siRNA sequence
cttccattctgaatatattgtca

SEQ ID NO: 13525 - DNA, 23 bp, Artificial Sequence
  human ApoB siRNA sequence
ttccattctgaatatattgtcag

SEQ ID NO: 13526 - DNA, 23 bp, Artificial Sequence
  human ApoB siRNA sequence
tccattctgaatatattgtcagt

SEQ ID NO: 13527 - DNA, 23 bp, Artificial Sequence
  human ApoB siRNA sequence
ccattctgaatatattgtcagtg

SEQ ID NO: 13528 - DNA, 23 bp, Artificial Sequence
  human ApoB siRNA sequence
cattctgaatatattgtcagtgc

SEQ ID NO: 13529 - DNA, 23 bp, Artificial Sequence
  human ApoB siRNA sequence
attctgaatatattgtcagtgcc

SEQ ID NO: 13530 - DNA, 23 bp, Artificial Sequence
  human ApoB siRNA sequence
ttctgaatatattgtcagtgcct

SEQ ID NO: 13531 - DNA, 23 bp, Artificial Sequence
  human ApoB siRNA sequence
tctgaatatattgtcagtgcctc

SEQ ID NO: 13532 - DNA, 23 bp, Artificial Sequence
  human ApoB siRNA sequence
ctgaatatattgtcagtgcctct

SEQ ID NO: 13533 - DNA, 23 bp, Artificial Sequence
  human ApoB siRNA sequence
tgaatatattgtcagtgcctcta

SEQ ID NO: 13534 - DNA, 23 bp, Artificial Sequence
  human ApoB siRNA sequence
gaatatattgtcagtgcctctaa

SEQ ID NO: 13535 - DNA, 23 bp, Artificial Sequence
  human ApoB siRNA sequence
aatatattgtcagtgcctctaac

SEQ ID NO: 13536 - DNA, 23 bp, Artificial Sequence
  human ApoB siRNA sequence
atatattgtcagtgcctctaact

SEQ ID NO: 13537 - DNA, 23 bp, Artificial Sequence
  human ApoB siRNA sequence
tatattgtcagtgcctctaactt

SEQ ID NO: 13538 - DNA, 23 bp, Artificial Sequence
  human ApoB siRNA sequence
atattgtcagtgcctctaacttt

SEQ ID NO: 13539 - DNA, 23 bp, Artificial Sequence
  human ApoB siRNA sequence
tattgtcagtgcctctaacttta

SEQ ID NO: 13540 - DNA, 23 bp, Artificial Sequence
  human ApoB siRNA sequence
attgtcagtgcctctaactttac

SEQ ID NO: 13541 - DNA, 23 bp, Artificial Sequence
  human ApoB siRNA sequence
ttgtcagtgcctctaactttact

SEQ ID NO: 13542 - DNA, 23 bp, Artificial Sequence
  human ApoB siRNA sequence
tgtcagtgcctctaactttactt

SEQ ID NO: 13543 - DNA, 23 bp, Artificial Sequence
  human ApoB siRNA sequence
gtcagtgcctctaactttacttc

SEQ ID NO: 13544 - DNA, 23 bp, Artificial Sequence
  human ApoB siRNA sequence
tcagtgcctctaactttacttcc

SEQ ID NO: 13545 - DNA, 23 bp, Artificial Sequence
  human ApoB siRNA sequence
cagtgcctctaactttacttccc

SEQ ID NO: 13546 - DNA, 23 bp, Artificial Sequence
  human ApoB siRNA sequence
agtgcctctaactttacttccca

SEQ ID NO: 13547 - DNA, 23 bp, Artificial Sequence
  human ApoB siRNA sequence
gtgcctctaactttacttcccaa

SEQ ID NO: 13548 - DNA, 23 bp, Artificial Sequence
  human ApoB siRNA sequence
tgcctctaactttacttcccaac

SEQ ID NO: 13549 - DNA, 23 bp, Artificial Sequence
  human ApoB siRNA sequence
gcctctaactttacttcccaact

SEQ ID NO: 13550 - DNA, 23 bp, Artificial Sequence
  human ApoB siRNA sequence
cctctaactttacttcccaactc

SEQ ID NO: 13551 - DNA, 23 bp, Artificial Sequence
  human ApoB siRNA sequence
ctctaactttacttcccaactct

SEQ ID NO: 13552 - DNA, 23 bp, Artificial Sequence
  human ApoB siRNA sequence
tctaactttacttcccaactctc

SEQ ID NO: 13553 - DNA, 23 bp, Artificial Sequence
  human ApoB siRNA sequence
ctaactttacttcccaactctca

SEQ ID NO: 13554 - DNA, 23 bp, Artificial Sequence
  human ApoB siRNA sequence
taactttacttcccaactctcaa

SEQ ID NO: 13555 - DNA, 23 bp, Artificial Sequence
  human ApoB siRNA sequence
aactttacttcccaactctcaag

SEQ ID NO: 13556 - DNA, 23 bp, Artificial Sequence
  human ApoB siRNA sequence
actttacttcccaactctcaagt

SEQ ID NO: 13557 - DNA, 23 bp, Artificial Sequence
  human ApoB siRNA sequence
ctttacttcccaactctcaagtc

SEQ ID NO: 13558 - DNA, 23 bp, Artificial Sequence
  human ApoB siRNA sequence
tttacttcccaactctcaagtca

SEQ ID NO: 13559 - DNA, 23 bp, Artificial Sequence
  human ApoB siRNA sequence
ttacttcccaactctcaagtcaa

SEQ ID NO: 13560 - DNA, 23 bp, Artificial Sequence
  human ApoB siRNA sequence
tacttcccaactctcaagtcaag

SEQ ID NO: 13561 - DNA, 23 bp, Artificial Sequence
  human ApoB siRNA sequence
acttcccaactctcaagtcaagt

SEQ ID NO: 13562 - DNA, 23 bp, Artificial Sequence
  human ApoB siRNA sequence
cttcccaactctcaagtcaagtt

SEQ ID NO: 13563 - DNA, 23 bp, Artificial Sequence
  human ApoB siRNA sequence
ttcccaactctcaagtcaagttg

SEQ ID NO: 13564 - DNA, 23 bp, Artificial Sequence
  human ApoB siRNA sequence
tcccaactctcaagtcaagttga

SEQ ID NO: 13565 - DNA, 23 bp, Artificial Sequence
  human ApoB siRNA sequence
cccaactctcaagtcaagttgag

SEQ ID NO: 13566 - DNA, 23 bp, Artificial Sequence
  human ApoB siRNA sequence
ccaactctcaagtcaagttgagc

SEQ ID NO: 13567 - DNA, 23 bp, Artificial Sequence
  human ApoB siRNA sequence
caactctcaagtcaagttgagca

SEQ ID NO: 13568 - DNA, 23 bp, Artificial Sequence
  human ApoB siRNA sequence
aactctcaagtcaagttgagcaa

SEQ ID NO: 13569 - DNA, 23 bp, Artificial Sequence
  human ApoB siRNA sequence
actctcaagtcaagttgagcaat

SEQ ID NO: 13570 - DNA, 23 bp, Artificial Sequence
  human ApoB siRNA sequence
ctctcaagtcaagttgagcaatt

SEQ ID NO: 13571 - DNA, 23 bp, Artificial Sequence
  human ApoB siRNA sequence
tctcaagtcaagttgagcaattt

SEQ ID NO: 13572 - DNA, 23 bp, Artificial Sequence
  human ApoB siRNA sequence
ctcaagtcaagttgagcaatttc

SEQ ID NO: 13573 - DNA, 23 bp, Artificial Sequence
  human ApoB siRNA sequence
tcaagtcaagttgagcaatttct

SEQ ID NO: 13574 - DNA, 23 bp, Artificial Sequence
  human ApoB siRNA sequence
caagtcaagttgagcaatttctg

SEQ ID NO: 13575 - DNA, 23 bp, Artificial Sequence
  human ApoB siRNA sequence
aagtcaagttgagcaatttctgc

SEQ ID NO: 13576 - DNA, 23 bp, Artificial Sequence
  human ApoB siRNA sequence
agtcaagttgagcaatttctgca

SEQ ID NO: 13577 - DNA, 23 bp, Artificial Sequence
  human ApoB siRNA sequence
gtcaagttgagcaatttctgcac

SEQ ID NO: 13578 - DNA, 23 bp, Artificial Sequence
  human ApoB siRNA sequence
tcaagttgagcaatttctgcaca

SEQ ID NO: 13579 - DNA, 23 bp, Artificial Sequence
  human ApoB siRNA sequence
caagttgagcaatttctgcacag

SEQ ID NO: 13580 - DNA, 23 bp, Artificial Sequence
  human ApoB siRNA sequence
aagttgagcaatttctgcacaga

SEQ ID NO: 13581 - DNA, 23 bp, Artificial Sequence
  human ApoB siRNA sequence
agttgagcaatttctgcacagaa

SEQ ID NO: 13582 - DNA, 23 bp, Artificial Sequence
  human ApoB siRNA sequence
gttgagcaatttctgcacagaaa

SEQ ID NO: 13583 - DNA, 23 bp, Artificial Sequence
  human ApoB siRNA sequence
ttgagcaatttctgcacagaaat

SEQ ID NO: 13584 - DNA, 23 bp, Artificial Sequence
  human ApoB siRNA sequence
tgagcaatttctgcacagaaata

SEQ ID NO: 13585 - DNA, 23 bp, Artificial Sequence
  human ApoB siRNA sequence
gagcaatttctgcacagaaatat

SEQ ID NO: 13586 - DNA, 23 bp, Artificial Sequence
  human ApoB siRNA sequence
agcaatttctgcacagaaatatt

SEQ ID NO: 13587 - DNA, 23 bp, Artificial Sequence
  human ApoB siRNA sequence
gcaatttctgcacagaaatattc

SEQ ID NO: 13588 - DNA, 23 bp, Artificial Sequence
  human ApoB siRNA sequence
caatttctgcacagaaatattca

SEQ ID NO: 13589 - DNA, 23 bp, Artificial Sequence
  human ApoB siRNA sequence
aatttctgcacagaaatattcag

SEQ ID NO: 13590 - DNA, 23 bp, Artificial Sequence
  human ApoB siRNA sequence
atttctgcacagaaatattcagg

SEQ ID NO: 13591 - DNA, 23 bp, Artificial Sequence
  human ApoB siRNA sequence
tttctgcacagaaatattcagga

SEQ ID NO: 13592 - DNA, 23 bp, Artificial Sequence
  human ApoB siRNA sequence
ttctgcacagaaatattcaggaa

SEQ ID NO: 13593 - DNA, 23 bp, Artificial Sequence
  human ApoB siRNA sequence
tctgcacagaaatattcaggaat

SEQ ID NO: 13594 - DNA, 23 bp, Artificial Sequence
  human ApoB siRNA sequence
ctgcacagaaatattcaggaata

SEQ ID NO: 13595 - DNA, 23 bp, Artificial Sequence
  human ApoB siRNA sequence
tgcacagaaatattcaggaatat

SEQ ID NO: 13596 - DNA, 23 bp, Artificial Sequence
  human ApoB siRNA sequence
gcacagaaatattcaggaatatc

SEQ ID NO: 13597 - DNA, 23 bp, Artificial Sequence
  human ApoB siRNA sequence
cacagaaatattcaggaatatct

SEQ ID NO: 13598 - DNA, 23 bp, Artificial Sequence
  human ApoB siRNA sequence
acagaaatattcaggaatatctt

SEQ ID NO: 13599 - DNA, 23 bp, Artificial Sequence
  human ApoB siRNA sequence
cagaaatattcaggaatatctta

SEQ ID NO: 13600 - DNA, 23 bp, Artificial Sequence
  human ApoB siRNA sequence
agaaatattcaggaatatcttag

SEQ ID NO: 13601 - DNA, 23 bp, Artificial Sequence
  human ApoB siRNA sequence
gaaatattcaggaatatcttagc

SEQ ID NO: 13602 - DNA, 23 bp, Artificial Sequence
  human ApoB siRNA sequence
aaatattcaggaatatcttagca

SEQ ID NO: 13603 - DNA, 23 bp, Artificial Sequence
  human ApoB siRNA sequence
aatattcaggaatatcttagcat

SEQ ID NO: 13604 - DNA, 23 bp, Artificial Sequence
  human ApoB siRNA sequence
atattcaggaatatcttagcatc

SEQ ID NO: 13605 - DNA, 23 bp, Artificial Sequence
  human ApoB siRNA sequence
tattcaggaatatcttagcatcc

SEQ ID NO: 13606 - DNA, 23 bp, Artificial Sequence
  human ApoB siRNA sequence
attcaggaatatcttagcatcct

SEQ ID NO: 13607 - DNA, 23 bp, Artificial Sequence
  human ApoB siRNA sequence
ttcaggaatatcttagcatcctt

SEQ ID NO: 13608 - DNA, 23 bp, Artificial Sequence
  human ApoB siRNA sequence
tcaggaatatcttagcatcctta

SEQ ID NO: 13609 - DNA, 23 bp, Artificial Sequence
  human ApoB siRNA sequence
caggaatatcttagcatccttac

SEQ ID NO: 13610 - DNA, 23 bp, Artificial Sequence
  human ApoB siRNA sequence
aggaatatcttagcatccttacc

SEQ ID NO: 13611 - DNA, 23 bp, Artificial Sequence
  human ApoB siRNA sequence
ggaatatcttagcatccttaccg

SEQ ID NO: 13612 - DNA, 23 bp, Artificial Sequence
  human ApoB siRNA sequence
gaatatcttagcatccttaccga

SEQ ID NO: 13613 - DNA, 23 bp, Artificial Sequence
  human ApoB siRNA sequence
aatatcttagcatccttaccgat

SEQ ID NO: 13614 - DNA, 23 bp, Artificial Sequence
  human ApoB siRNA sequence
atatcttagcatccttaccgatc

SEQ ID NO: 13615 - DNA, 23 bp, Artificial Sequence
  human ApoB siRNA sequence
tatcttagcatccttaccgatcc

SEQ ID NO: 13616 - DNA, 23 bp, Artificial Sequence
  human ApoB siRNA sequence
atcttagcatccttaccgatcca

SEQ ID NO: 13617 - DNA, 23 bp, Artificial Sequence
  human ApoB siRNA sequence
tcttagcatccttaccgatccag

SEQ ID NO: 13618 - DNA, 23 bp, Artificial Sequence
  human ApoB siRNA sequence
cttagcatccttaccgatccaga

SEQ ID NO: 13619 - DNA, 23 bp, Artificial Sequence
  human ApoB siRNA sequence
ttagcatccttaccgatccagat

SEQ ID NO: 13620 - DNA, 23 bp, Artificial Sequence
  human ApoB siRNA sequence
tagcatccttaccgatccagatg

SEQ ID NO: 13621 - DNA, 23 bp, Artificial Sequence
  human ApoB siRNA sequence
agcatccttaccgatccagatgg

SEQ ID NO: 13622 - DNA, 23 bp, Artificial Sequence
  human ApoB siRNA sequence
gcatccttaccgatccagatgga

SEQ ID NO: 13623 - DNA, 23 bp, Artificial Sequence
  human ApoB siRNA sequence
catccttaccgatccagatggaa

SEQ ID NO: 13624 - DNA, 23 bp, Artificial Sequence
  human ApoB siRNA sequence
atccttaccgatccagatggaaa

SEQ ID NO: 13625 - DNA, 23 bp, Artificial Sequence
  human ApoB siRNA sequence
tccttaccgatccagatggaaaa

SEQ ID NO: 13626 - DNA, 23 bp, Artificial Sequence
  human ApoB siRNA sequence
ccttaccgatccagatggaaaag

SEQ ID NO: 13627 - DNA, 23 bp, Artificial Sequence
  human ApoB siRNA sequence
cttaccgatccagatggaaaagg

SEQ ID NO: 13628 - DNA, 23 bp, Artificial Sequence
  human ApoB siRNA sequence
ttaccgatccagatggaaaaggg

SEQ ID NO: 13629 - DNA, 23 bp, Artificial Sequence
  human ApoB siRNA sequence
taccgatccagatggaaaaggga

SEQ ID NO: 13630 - DNA, 23 bp, Artificial Sequence
  human ApoB siRNA sequence
accgatccagatggaaaagggaa

SEQ ID NO: 13631 - DNA, 23 bp, Artificial Sequence
  human ApoB siRNA sequence
ccgatccagatggaaaagggaaa

SEQ ID NO: 13632 - DNA, 23 bp, Artificial Sequence
  human ApoB siRNA sequence
cgatccagatggaaaagggaaag

SEQ ID NO: 13633 - DNA, 23 bp, Artificial Sequence
  human ApoB siRNA sequence
gatccagatggaaaagggaaaga

SEQ ID NO: 13634 - DNA, 23 bp, Artificial Sequence
  human ApoB siRNA sequence
atccagatggaaaagggaaagag

SEQ ID NO: 13635 - DNA, 23 bp, Artificial Sequence
  human ApoB siRNA sequence
tccagatggaaaagggaaagaga

SEQ ID NO: 13636 - DNA, 23 bp, Artificial Sequence
  human ApoB siRNA sequence
ccagatggaaaagggaaagagaa

SEQ ID NO: 13637 - DNA, 23 bp, Artificial Sequence
  human ApoB siRNA sequence
cagatggaaaagggaaagagaag

SEQ ID NO: 13638 - DNA, 23 bp, Artificial Sequence
  human ApoB siRNA sequence
agatggaaaagggaaagagaaga

SEQ ID NO: 13639 - DNA, 23 bp, Artificial Sequence
  human ApoB siRNA sequence
gatggaaaagggaaagagaagat

SEQ ID NO: 13640 - DNA, 23 bp, Artificial Sequence
  human ApoB siRNA sequence
atggaaaagggaaagagaagatt

SEQ ID NO: 13641 - DNA, 23 bp, Artificial Sequence
  human ApoB siRNA sequence
tggaaaagggaaagagaagattg

SEQ ID NO: 13642 - DNA, 23 bp, Artificial Sequence
  human ApoB siRNA sequence
ggaaaagggaaagagaagattgc

SEQ ID NO: 13643 - DNA, 23 bp, Artificial Sequence
  human ApoB siRNA sequence
gaaaagggaaagagaagattgca

SEQ ID NO: 13644 - DNA, 23 bp, Artificial Sequence
  human ApoB siRNA sequence
aaaagggaaagagaagattgcag

SEQ ID NO: 13645 - DNA, 23 bp, Artificial Sequence
  human ApoB siRNA sequence
aaagggaaagagaagattgcaga

SEQ ID NO: 13646 - DNA, 23 bp, Artificial Sequence
  human ApoB siRNA sequence
aagggaaagagaagattgcagag

SEQ ID NO: 13647 - DNA, 23 bp, Artificial Sequence
  human ApoB siRNA sequence
agggaaagagaagattgcagagc

SEQ ID NO: 13648 - DNA, 23 bp, Artificial Sequence
  human ApoB siRNA sequence
gggaaagagaagattgcagagct

SEQ ID NO: 13649 - DNA, 23 bp, Artificial Sequence
  human ApoB siRNA sequence
ggaaagagaagattgcagagctt

SEQ ID NO: 13650 - DNA, 23 bp, Artificial Sequence
  human ApoB siRNA sequence
gaaagagaagattgcagagcttt

SEQ ID NO: 13651 - DNA, 23 bp, Artificial Sequence
  human ApoB siRNA sequence
aaagagaagattgcagagctttc

SEQ ID NO: 13652 - DNA, 23 bp, Artificial Sequence
  human ApoB siRNA sequence
aagagaagattgcagagctttct

SEQ ID NO: 13653 - DNA, 23 bp, Artificial Sequence
  human ApoB siRNA sequence
agagaagattgcagagctttctg

SEQ ID NO: 13654 - DNA, 23 bp, Artificial Sequence
  human ApoB siRNA sequence
gagaagattgcagagctttctgc

SEQ ID NO: 13655 - DNA, 23 bp, Artificial Sequence
  human ApoB siRNA sequence
agaagattgcagagctttctgcc

SEQ ID NO: 13656 - DNA, 23 bp, Artificial Sequence
  human ApoB siRNA sequence
gaagattgcagagctttctgcca

SEQ ID NO: 13657 - DNA, 23 bp, Artificial Sequence
  human ApoB siRNA sequence
aagattgcagagctttctgccac

SEQ ID NO: 13658 - DNA, 23 bp, Artificial Sequence
  human ApoB siRNA sequence
agattgcagagctttctgccact

SEQ ID NO: 13659 - DNA, 23 bp, Artificial Sequence
  human ApoB siRNA sequence
gattgcagagctttctgccactg

SEQ ID NO: 13660 - DNA, 23 bp, Artificial Sequence
  human ApoB siRNA sequence
attgcagagctttctgccactgc

SEQ ID NO: 13661 - DNA, 23 bp, Artificial Sequence
  human ApoB siRNA sequence
ttgcagagctttctgccactgct

SEQ ID NO: 13662 - DNA, 23 bp, Artificial Sequence
  human ApoB siRNA sequence
tgcagagctttctgccactgctc

SEQ ID NO: 13663 - DNA, 23 bp, Artificial Sequence
  human ApoB siRNA sequence
gcagagctttctgccactgctca

SEQ ID NO: 13664 - DNA, 23 bp, Artificial Sequence
  human ApoB siRNA sequence
cagagctttctgccactgctcag

SEQ ID NO: 13665 - DNA, 23 bp, Artificial Sequence
  human ApoB siRNA sequence
agagctttctgccactgctcagg

SEQ ID NO: 13666 - DNA, 23 bp, Artificial Sequence
  human ApoB siRNA sequence
gagctttctgccactgctcagga

SEQ ID NO: 13667 - DNA, 23 bp, Artificial Sequence
  human ApoB siRNA sequence
agctttctgccactgctcaggaa

SEQ ID NO: 13668 - DNA, 23 bp, Artificial Sequence
  human ApoB siRNA sequence
gctttctgccactgctcaggaaa

SEQ ID NO: 13669 - DNA, 23 bp, Artificial Sequence
  human ApoB siRNA sequence
ctttctgccactgctcaggaaat

SEQ ID NO: 13670 - DNA, 23 bp, Artificial Sequence
  human ApoB siRNA sequence
tttctgccactgctcaggaaata

SEQ ID NO: 13671 - DNA, 23 bp, Artificial Sequence
  human ApoB siRNA sequence
ttctgccactgctcaggaaataa

SEQ ID NO: 13672 - DNA, 23 bp, Artificial Sequence
  human ApoB siRNA sequence
tctgccactgctcaggaaataat

SEQ ID NO: 13673 - DNA, 23 bp, Artificial Sequence
  human ApoB siRNA sequence
ctgccactgctcaggaaataatt

SEQ ID NO: 13674 - DNA, 23 bp, Artificial Sequence
  human ApoB siRNA sequence
tgccactgctcaggaaataatta

SEQ ID NO: 13675 - DNA, 23 bp, Artificial Sequence
  human ApoB siRNA sequence
gccactgctcaggaaataattaa

SEQ ID NO: 13676 - DNA, 23 bp, Artificial Sequence
  human ApoB siRNA sequence
ccactgctcaggaaataattaaa

SEQ ID NO: 13677 - DNA, 23 bp, Artificial Sequence
  human ApoB siRNA sequence
cactgctcaggaaataattaaaa

SEQ ID NO: 13678 - DNA, 23 bp, Artificial Sequence
  human ApoB siRNA sequence
actgctcaggaaataattaaaag

SEQ ID NO: 13679 - DNA, 23 bp, Artificial Sequence
  human ApoB siRNA sequence
ctgctcaggaaataattaaaagc

SEQ ID NO: 13680 - DNA, 23 bp, Artificial Sequence
  human ApoB siRNA sequence
tgctcaggaaataattaaaagcc

SEQ ID NO: 13681 - DNA, 23 bp, Artificial Sequence
  human ApoB siRNA sequence
gctcaggaaataattaaaagcca

SEQ ID NO: 13682 - DNA, 23 bp, Artificial Sequence
  human ApoB siRNA sequence
ctcaggaaataattaaaagccag

SEQ ID NO: 13683 - DNA, 23 bp, Artificial Sequence
  human ApoB siRNA sequence
tcaggaaataattaaaagccagg

SEQ ID NO: 13684 - DNA, 23 bp, Artificial Sequence
  human ApoB siRNA sequence
caggaaataattaaaagccaggc

SEQ ID NO: 13685 - DNA, 23 bp, Artificial Sequence
  human ApoB siRNA sequence
aggaaataattaaaagccaggcc

SEQ ID NO: 13686 - DNA, 23 bp, Artificial Sequence
  human ApoB siRNA sequence
ggaaataattaaaagccaggcca

SEQ ID NO: 13687 - DNA, 23 bp, Artificial Sequence
  human ApoB siRNA sequence
gaaataattaaaagccaggccat

SEQ ID NO: 13688 - DNA, 23 bp, Artificial Sequence
  human ApoB siRNA sequence
aaataattaaaagccaggccatt

SEQ ID NO: 13689 - DNA, 23 bp, Artificial Sequence
  human ApoB siRNA sequence
aataattaaaagccaggccattg

SEQ ID NO: 13690 - DNA, 23 bp, Artificial Sequence
  human ApoB siRNA sequence
ataattaaaagccaggccattgc

SEQ ID NO: 13691 - DNA, 23 bp, Artificial Sequence
  human ApoB siRNA sequence
taattaaaagccaggccattgcg

SEQ ID NO: 13692 - DNA, 23 bp, Artificial Sequence
  human ApoB siRNA sequence
aattaaaagccaggccattgcga

SEQ ID NO: 13693 - DNA, 23 bp, Artificial Sequence
  human ApoB siRNA sequence
attaaaagccaggccattgcgac

SEQ ID NO: 13694 - DNA, 23 bp, Artificial Sequence
  human ApoB siRNA sequence
ttaaaagccaggccattgcgacg

SEQ ID NO: 13695 - DNA, 23 bp, Artificial Sequence
  human ApoB siRNA sequence
taaaagccaggccattgcgacga

SEQ ID NO: 13696 - DNA, 23 bp, Artificial Sequence
  human ApoB siRNA sequence
aaaagccaggccattgcgacgaa

SEQ ID NO: 13697 - DNA, 23 bp, Artificial Sequence
  human ApoB siRNA sequence
aaagccaggccattgcgacgaag

SEQ ID NO: 13698 - DNA, 23 bp, Artificial Sequence
  human ApoB siRNA sequence
aagccaggccattgcgacgaaga

SEQ ID NO: 13699 - DNA, 23 bp, Artificial Sequence
  human ApoB siRNA sequence
agccaggccattgcgacgaagaa

SEQ ID NO: 13700 - DNA, 23 bp, Artificial Sequence
  human ApoB siRNA sequence
gccaggccattgcgacgaagaaa

SEQ ID NO: 13701 - DNA, 23 bp, Artificial Sequence
  human ApoB siRNA sequence
ccaggccattgcgacgaagaaaa

SEQ ID NO: 13702 - DNA, 23 bp, Artificial Sequence
  human ApoB siRNA sequence
caggccattgcgacgaagaaaat

SEQ ID NO: 13703 - DNA, 23 bp, Artificial Sequence
  human ApoB siRNA sequence
aggccattgcgacgaagaaaata

SEQ ID NO: 13704 - DNA, 23 bp, Artificial Sequence
  human ApoB siRNA sequence
ggccattgcgacgaagaaaataa

SEQ ID NO: 13705 - DNA, 23 bp, Artificial Sequence
  human ApoB siRNA sequence
gccattgcgacgaagaaaataat

SEQ ID NO: 13706 - DNA, 23 bp, Artificial Sequence
  human ApoB siRNA sequence
ccattgcgacgaagaaaataatt

SEQ ID NO: 13707 - DNA, 23 bp, Artificial Sequence
  human ApoB siRNA sequence
cattgcgacgaagaaaataattt

SEQ ID NO: 13708 - DNA, 23 bp, Artificial Sequence
  human ApoB siRNA sequence
attgcgacgaagaaaataatttc

SEQ ID NO: 13709 - DNA, 23 bp, Artificial Sequence
  human ApoB siRNA sequence
ttgcgacgaagaaaataatttct

SEQ ID NO: 13710 - DNA, 23 bp, Artificial Sequence
  human ApoB siRNA sequence
tgcgacgaagaaaataatttctg

SEQ ID NO: 13711 - DNA, 23 bp, Artificial Sequence
  human ApoB siRNA sequence
gcgacgaagaaaataatttctga

SEQ ID NO: 13712 - DNA, 23 bp, Artificial Sequence
  human ApoB siRNA sequence
cgacgaagaaaataatttctgat

SEQ ID NO: 13713 - DNA, 23 bp, Artificial Sequence
  human ApoB siRNA sequence
gacgaagaaaataatttctgatt

SEQ ID NO: 13714 - DNA, 23 bp, Artificial Sequence
  human ApoB siRNA sequence
acgaagaaaataatttctgatta

SEQ ID NO: 13715 - DNA, 23 bp, Artificial Sequence
  human ApoB siRNA sequence
cgaagaaaataatttctgattac

SEQ ID NO: 13716 - DNA, 23 bp, Artificial Sequence
  human ApoB siRNA sequence
gaagaaaataatttctgattacc

SEQ ID NO: 13717 - DNA, 23 bp, Artificial Sequence
  human ApoB siRNA sequence
aagaaaataatttctgattacca

SEQ ID NO: 13718 - DNA, 23 bp, Artificial Sequence
  human ApoB siRNA sequence
agaaaataatttctgattaccac

SEQ ID NO: 13719 - DNA, 23 bp, Artificial Sequence
  human ApoB siRNA sequence
gaaaataatttctgattaccacc

SEQ ID NO: 13720 - DNA, 23 bp, Artificial Sequence
  human ApoB siRNA sequence
aaaataatttctgattaccacca

SEQ ID NO: 13721 - DNA, 23 bp, Artificial Sequence
  human ApoB siRNA sequence
aaataatttctgattaccaccag

SEQ ID NO: 13722 - DNA, 23 bp, Artificial Sequence
  human ApoB siRNA sequence
aataatttctgattaccaccagc

SEQ ID NO: 13723 - DNA, 23 bp, Artificial Sequence
  human ApoB siRNA sequence
ataatttctgattaccaccagca

SEQ ID NO: 13724 - DNA, 23 bp, Artificial Sequence
  human ApoB siRNA sequence
taatttctgattaccaccagcag

SEQ ID NO: 13725 - DNA, 23 bp, Artificial Sequence
  human ApoB siRNA sequence
aatttctgattaccaccagcagt

SEQ ID NO: 13726 - DNA, 23 bp, Artificial Sequence
  human ApoB siRNA sequence
atttctgattaccaccagcagtt

SEQ ID NO: 13727 - DNA, 23 bp, Artificial Sequence
  human ApoB siRNA sequence
tttctgattaccaccagcagttt

SEQ ID NO: 13728 - DNA, 23 bp, Artificial Sequence
  human ApoB siRNA sequence
ttctgattaccaccagcagttta

SEQ ID NO: 13729 - DNA, 23 bp, Artificial Sequence
  human ApoB siRNA sequence
tctgattaccaccagcagtttag

SEQ ID NO: 13730 - DNA, 23 bp, Artificial Sequence
  human ApoB siRNA sequence
ctgattaccaccagcagtttaga

SEQ ID NO: 13731 - DNA, 23 bp, Artificial Sequence
  human ApoB siRNA sequence
tgattaccaccagcagtttagat

SEQ ID NO: 13732 - DNA, 23 bp, Artificial Sequence
  human ApoB siRNA sequence
gattaccaccagcagtttagata

SEQ ID NO: 13733 - DNA, 23 bp, Artificial Sequence
  human ApoB siRNA sequence
attaccaccagcagtttagatat

SEQ ID NO: 13734 - DNA, 23 bp, Artificial Sequence
  human ApoB siRNA sequence
ttaccaccagcagtttagatata

SEQ ID NO: 13735 - DNA, 23 bp, Artificial Sequence
  human ApoB siRNA sequence
taccaccagcagtttagatataa

SEQ ID NO: 13736 - DNA, 23 bp, Artificial Sequence
  human ApoB siRNA sequence
accaccagcagtttagatataaa

SEQ ID NO: 13737 - DNA, 23 bp, Artificial Sequence
  human ApoB siRNA sequence
ccaccagcagtttagatataaac

SEQ ID NO: 13738 - DNA, 23 bp, Artificial Sequence
  human ApoB siRNA sequence
caccagcagtttagatataaact

SEQ ID NO: 13739 - DNA, 23 bp, Artificial Sequence
  human ApoB siRNA sequence
accagcagtttagatataaactg

SEQ ID NO: 13740 - DNA, 23 bp, Artificial Sequence
  human ApoB siRNA sequence
ccagcagtttagatataaactgc

SEQ ID NO: 13741 - DNA, 23 bp, Artificial Sequence
  human ApoB siRNA sequence
cagcagtttagatataaactgca

SEQ ID NO: 13742 - DNA, 23 bp, Artificial Sequence
  human ApoB siRNA sequence
agcagtttagatataaactgcaa

SEQ ID NO: 13743 - DNA, 23 bp, Artificial Sequence
  human ApoB siRNA sequence
gcagtttagatataaactgcaag

SEQ ID NO: 13744 - DNA, 23 bp, Artificial Sequence
  human ApoB siRNA sequence
cagtttagatataaactgcaaga

SEQ ID NO: 13745 - DNA, 23 bp, Artificial Sequence
  human ApoB siRNA sequence
agtttagatataaactgcaagat

SEQ ID NO: 13746 - DNA, 23 bp, Artificial Sequence
  human ApoB siRNA sequence
gtttagatataaactgcaagatt

SEQ ID NO: 13747 - DNA, 23 bp, Artificial Sequence
  human ApoB siRNA sequence
tttagatataaactgcaagattt

SEQ ID NO: 13748 - DNA, 23 bp, Artificial Sequence
  human ApoB siRNA sequence
ttagatataaactgcaagatttt

SEQ ID NO: 13749 - DNA, 23 bp, Artificial Sequence
  human ApoB siRNA sequence
tagatataaactgcaagattttt

SEQ ID NO: 13750 - DNA, 23 bp, Artificial Sequence
  human ApoB siRNA sequence
agatataaactgcaagatttttc

SEQ ID NO: 13751 - DNA, 23 bp, Artificial Sequence
  human ApoB siRNA sequence
gatataaactgcaagatttttca

SEQ ID NO: 13752 - DNA, 23 bp, Artificial Sequence
  human ApoB siRNA sequence
atataaactgcaagatttttcag

SEQ ID NO: 13753 - DNA, 23 bp, Artificial Sequence
  human ApoB siRNA sequence
tataaactgcaagatttttcaga

SEQ ID NO: 13754 - DNA, 23 bp, Artificial Sequence
  human ApoB siRNA sequence
ataaactgcaagatttttcagac

SEQ ID NO: 13755 - DNA, 23 bp, Artificial Sequence
  human ApoB siRNA sequence
taaactgcaagatttttcagacc

SEQ ID NO: 13756 - DNA, 23 bp, Artificial Sequence
  human ApoB siRNA sequence
aaactgcaagatttttcagacca

SEQ ID NO: 13757 - DNA, 23 bp, Artificial Sequence
  human ApoB siRNA sequence
aactgcaagatttttcagaccaa

SEQ ID NO: 13758 - DNA, 23 bp, Artificial Sequence
  human ApoB siRNA sequence
actgcaagatttttcagaccaac

SEQ ID NO: 13759 - DNA, 23 bp, Artificial Sequence
  human ApoB siRNA sequence
ctgcaagatttttcagaccaact

SEQ ID NO: 13760 - DNA, 23 bp, Artificial Sequence
  human ApoB siRNA sequence
tgcaagatttttcagaccaactc

SEQ ID NO: 13761 - DNA, 23 bp, Artificial Sequence
  human ApoB siRNA sequence
gcaagatttttcagaccaactct

SEQ ID NO: 13762 - DNA, 23 bp, Artificial Sequence
  human ApoB siRNA sequence
caagatttttcagaccaactctc

SEQ ID NO: 13763 - DNA, 23 bp, Artificial Sequence
  human ApoB siRNA sequence
aagatttttcagaccaactctct

SEQ ID NO: 13764 - DNA, 23 bp, Artificial Sequence
  human ApoB siRNA sequence
agatttttcagaccaactctctg

SEQ ID NO: 13765 - DNA, 23 bp, Artificial Sequence
  human ApoB siRNA sequence
gatttttcagaccaactctctga

SEQ ID NO: 13766 - DNA, 23 bp, Artificial Sequence
  human ApoB siRNA sequence
atttttcagaccaactctctgat

SEQ ID NO: 13767 - DNA, 23 bp, Artificial Sequence
  human ApoB siRNA sequence
tttttcagaccaactctctgatt

SEQ ID NO: 13768 - DNA, 23 bp, Artificial Sequence
  human ApoB siRNA sequence
ttttcagaccaactctctgatta

SEQ ID NO: 13769 - DNA, 23 bp, Artificial Sequence
  human ApoB siRNA sequence
tttcagaccaactctctgattac

SEQ ID NO: 13770 - DNA, 23 bp, Artificial Sequence
  human ApoB siRNA sequence
ttcagaccaactctctgattact

SEQ ID NO: 13771 - DNA, 23 bp, Artificial Sequence
  human ApoB siRNA sequence
tcagaccaactctctgattacta

SEQ ID NO: 13772 - DNA, 23 bp, Artificial Sequence
  human ApoB siRNA sequence
cagaccaactctctgattactat

SEQ ID NO: 13773 - DNA, 23 bp, Artificial Sequence
  human ApoB siRNA sequence
agaccaactctctgattactatg

SEQ ID NO: 13774 - DNA, 23 bp, Artificial Sequence
  human ApoB siRNA sequence
gaccaactctctgattactatga

SEQ ID NO: 13775 - DNA, 23 bp, Artificial Sequence
  human ApoB siRNA sequence
accaactctctgattactatgaa

SEQ ID NO: 13776 - DNA, 23 bp, Artificial Sequence
  human ApoB siRNA sequence
ccaactctctgattactatgaaa

SEQ ID NO: 13777 - DNA, 23 bp, Artificial Sequence
  human ApoB siRNA sequence
caactctctgattactatgaaaa

SEQ ID NO: 13778 - DNA, 23 bp, Artificial Sequence
  human ApoB siRNA sequence
aactctctgattactatgaaaaa

SEQ ID NO: 13779 - DNA, 23 bp, Artificial Sequence
  human ApoB siRNA sequence
actctctgattactatgaaaaat

SEQ ID NO: 13780 - DNA, 23 bp, Artificial Sequence
  human ApoB siRNA sequence
ctctctgattactatgaaaaatt

SEQ ID NO: 13781 - DNA, 23 bp, Artificial Sequence
  human ApoB siRNA sequence
tctctgattactatgaaaaattt

SEQ ID NO: 13782 - DNA, 23 bp, Artificial Sequence
  human ApoB siRNA sequence
ctctgattactatgaaaaattta

SEQ ID NO: 13783 - DNA, 23 bp, Artificial Sequence
  human ApoB siRNA sequence
tctgattactatgaaaaatttat

SEQ ID NO: 13784 - DNA, 23 bp, Artificial Sequence
  human ApoB siRNA sequence
ctgattactatgaaaaatttatt

SEQ ID NO: 13785 - DNA, 23 bp, Artificial Sequence
  human ApoB siRNA sequence
tgattactatgaaaaatttattg

SEQ ID NO: 13786 - DNA, 23 bp, Artificial Sequence
  human ApoB siRNA sequence
gattactatgaaaaatttattgc

SEQ ID NO: 13787 - DNA, 23 bp, Artificial Sequence
  human ApoB siRNA sequence
attactatgaaaaatttattgct

SEQ ID NO: 13788 - DNA, 23 bp, Artificial Sequence
  human ApoB siRNA sequence
ttactatgaaaaatttattgctg

SEQ ID NO: 13789 - DNA, 23 bp, Artificial Sequence
  human ApoB siRNA sequence
tactatgaaaaatttattgctga

SEQ ID NO: 13790 - DNA, 23 bp, Artificial Sequence
  human ApoB siRNA sequence
actatgaaaaatttattgctgaa

SEQ ID NO: 13791 - DNA, 23 bp, Artificial Sequence
  human ApoB siRNA sequence
ctatgaaaaatttattgctgaat

SEQ ID NO: 13792 - DNA, 23 bp, Artificial Sequence
  human ApoB siRNA sequence
tatgaaaaatttattgctgaatc

SEQ ID NO: 13793 - DNA, 23 bp, Artificial Sequence
  human ApoB siRNA sequence
atgaaaaatttattgctgaatcc

SEQ ID NO: 13794 - DNA, 23 bp, Artificial Sequence
  human ApoB siRNA sequence
tgaaaaatttattgctgaatcca

SEQ ID NO: 13795 - DNA, 23 bp, Artificial Sequence
  human ApoB siRNA sequence
gaaaaatttattgctgaatccaa

SEQ ID NO: 13796 - DNA, 23 bp, Artificial Sequence
  human ApoB siRNA sequence
aaaaatttattgctgaatccaaa

SEQ ID NO: 13797 - DNA, 23 bp, Artificial Sequence
  human ApoB siRNA sequence
aaaatttattgctgaatccaaaa

SEQ ID NO: 13798 - DNA, 23 bp, Artificial Sequence
  human ApoB siRNA sequence
aaatttattgctgaatccaaaag

SEQ ID NO: 13799 - DNA, 23 bp, Artificial Sequence
  human ApoB siRNA sequence
aatttattgctgaatccaaaaga

SEQ ID NO: 13800 - DNA, 23 bp, Artificial Sequence
  human ApoB siRNA sequence
atttattgctgaatccaaaagat

SEQ ID NO: 13801 - DNA, 23 bp, Artificial Sequence
  human ApoB siRNA sequence
tttattgctgaatccaaaagatt

SEQ ID NO: 13802 - DNA, 23 bp, Artificial Sequence
  human ApoB siRNA sequence
ttattgctgaatccaaaagattg

SEQ ID NO: 13803 - DNA, 23 bp, Artificial Sequence
  human ApoB siRNA sequence
tattgctgaatccaaaagattga

SEQ ID NO: 13804 - DNA, 23 bp, Artificial Sequence
  human ApoB siRNA sequence
attgctgaatccaaaagattgat

SEQ ID NO: 13805 - DNA, 23 bp, Artificial Sequence
  human ApoB siRNA sequence
ttgctgaatccaaaagattgatt

SEQ ID NO: 13806 - DNA, 23 bp, Artificial Sequence
  human ApoB siRNA sequence
tgctgaatccaaaagattgattg

SEQ ID NO: 13807 - DNA, 23 bp, Artificial Sequence
  human ApoB siRNA sequence
gctgaatccaaaagattgattga

SEQ ID NO: 13808 - DNA, 23 bp, Artificial Sequence
  human ApoB siRNA sequence
ctgaatccaaaagattgattgac

SEQ ID NO: 13809 - DNA, 23 bp, Artificial Sequence
  human ApoB siRNA sequence
tgaatccaaaagattgattgacc

SEQ ID NO: 13810 - DNA, 23 bp, Artificial Sequence
  human ApoB siRNA sequence
gaatccaaaagattgattgacct

SEQ ID NO: 13811 - DNA, 23 bp, Artificial Sequence
  human ApoB siRNA sequence
aatccaaaagattgattgacctg

SEQ ID NO: 13812 - DNA, 23 bp, Artificial Sequence
  human ApoB siRNA sequence
atccaaaagattgattgacctgt

SEQ ID NO: 13813 - DNA, 23 bp, Artificial Sequence
  human ApoB siRNA sequence
tccaaaagattgattgacctgtc

SEQ ID NO: 13814 - DNA, 23 bp, Artificial Sequence
  human ApoB siRNA sequence
ccaaaagattgattgacctgtcc

SEQ ID NO: 13815 - DNA, 23 bp, Artificial Sequence
  human ApoB siRNA sequence
caaaagattgattgacctgtcca

SEQ ID NO: 13816 - DNA, 23 bp, Artificial Sequence
  human ApoB siRNA sequence
aaaagattgattgacctgtccat

SEQ ID NO: 13817 - DNA, 23 bp, Artificial Sequence
  human ApoB siRNA sequence
aaagattgattgacctgtccatt

SEQ ID NO: 13818 - DNA, 23 bp, Artificial Sequence
  human ApoB siRNA sequence
aagattgattgacctgtccattc

SEQ ID NO: 13819 - DNA, 23 bp, Artificial Sequence
  human ApoB siRNA sequence
agattgattgacctgtccattca

SEQ ID NO: 13820 - DNA, 23 bp, Artificial Sequence
  human ApoB siRNA sequence
gattgattgacctgtccattcaa

SEQ ID NO: 13821 - DNA, 23 bp, Artificial Sequence
  human ApoB siRNA sequence
attgattgacctgtccattcaaa

SEQ ID NO: 13822 - DNA, 23 bp, Artificial Sequence
  human ApoB siRNA sequence
ttgattgacctgtccattcaaaa

SEQ ID NO: 13823 - DNA, 23 bp, Artificial Sequence
  human ApoB siRNA sequence
tgattgacctgtccattcaaaac

SEQ ID NO: 13824 - DNA, 23 bp, Artificial Sequence
  human ApoB siRNA sequence
gattgacctgtccattcaaaact

SEQ ID NO: 13825 - DNA, 23 bp, Artificial Sequence
  human ApoB siRNA sequence
attgacctgtccattcaaaacta

SEQ ID NO: 13826 - DNA, 23 bp, Artificial Sequence
  human ApoB siRNA sequence
ttgacctgtccattcaaaactac

SEQ ID NO: 13827 - DNA, 23 bp, Artificial Sequence
  human ApoB siRNA sequence
tgacctgtccattcaaaactacc

SEQ ID NO: 13828 - DNA, 23 bp, Artificial Sequence
  human ApoB siRNA sequence
gacctgtccattcaaaactacca

SEQ ID NO: 13829 - DNA, 23 bp, Artificial Sequence
  human ApoB siRNA sequence
acctgtccattcaaaactaccac

SEQ ID NO: 13830 - DNA, 23 bp, Artificial Sequence
  human ApoB siRNA sequence
cctgtccattcaaaactaccaca

SEQ ID NO: 13831 - DNA, 23 bp, Artificial Sequence
  human ApoB siRNA sequence
ctgtccattcaaaactaccacac

SEQ ID NO: 13832 - DNA, 23 bp, Artificial Sequence
  human ApoB siRNA sequence
tgtccattcaaaactaccacaca

SEQ ID NO: 13833 - DNA, 23 bp, Artificial Sequence
  human ApoB siRNA sequence
gtccattcaaaactaccacacat

SEQ ID NO: 13834 - DNA, 23 bp, Artificial Sequence
  human ApoB siRNA sequence
tccattcaaaactaccacacatt

SEQ ID NO: 13835 - DNA, 23 bp, Artificial Sequence
  human ApoB siRNA sequence
ccattcaaaactaccacacattt

SEQ ID NO: 13836 - DNA, 23 bp, Artificial Sequence
  human ApoB siRNA sequence
cattcaaaactaccacacatttc

SEQ ID NO: 13837 - DNA, 23 bp, Artificial Sequence
  human ApoB siRNA sequence
attcaaaactaccacacatttct

SEQ ID NO: 13838 - DNA, 23 bp, Artificial Sequence
  human ApoB siRNA sequence
ttcaaaactaccacacatttctg

SEQ ID NO: 13839 - DNA, 23 bp, Artificial Sequence
  human ApoB siRNA sequence
tcaaaactaccacacatttctga

SEQ ID NO: 13840 - DNA, 23 bp, Artificial Sequence
  human ApoB siRNA sequence
caaaactaccacacatttctgat

SEQ ID NO: 13841 - DNA, 23 bp, Artificial Sequence
  human ApoB siRNA sequence
aaaactaccacacatttctgata

SEQ ID NO: 13842 - DNA, 23 bp, Artificial Sequence
  human ApoB siRNA sequence
aaactaccacacatttctgatat

SEQ ID NO: 13843 - DNA, 23 bp, Artificial Sequence
  human ApoB siRNA sequence
aactaccacacatttctgatata

SEQ ID NO: 13844 - DNA, 23 bp, Artificial Sequence
  human ApoB siRNA sequence
actaccacacatttctgatatac

SEQ ID NO: 13845 - DNA, 23 bp, Artificial Sequence
  human ApoB siRNA sequence
ctaccacacatttctgatataca

SEQ ID NO: 13846 - DNA, 23 bp, Artificial Sequence
  human ApoB siRNA sequence
taccacacatttctgatatacat

SEQ ID NO: 13847 - DNA, 23 bp, Artificial Sequence
  human ApoB siRNA sequence
accacacatttctgatatacatc

SEQ ID NO: 13848 - DNA, 23 bp, Artificial Sequence
  human ApoB siRNA sequence
ccacacatttctgatatacatca

SEQ ID NO: 13849 - DNA, 23 bp, Artificial Sequence
  human ApoB siRNA sequence
cacacatttctgatatacatcac

SEQ ID NO: 13850 - DNA, 23 bp, Artificial Sequence
  human ApoB siRNA sequence
acacatttctgatatacatcacg

SEQ ID NO: 13851 - DNA, 23 bp, Artificial Sequence
  human ApoB siRNA sequence
cacatttctgatatacatcacgg

SEQ ID NO: 13852 - DNA, 23 bp, Artificial Sequence
  human ApoB siRNA sequence
acatttctgatatacatcacgga

SEQ ID NO: 13853 - DNA, 23 bp, Artificial Sequence
  human ApoB siRNA sequence
catttctgatatacatcacggag

SEQ ID NO: 13854 - DNA, 23 bp, Artificial Sequence
  human ApoB siRNA sequence
atttctgatatacatcacggagt

SEQ ID NO: 13855 - DNA, 23 bp, Artificial Sequence
  human ApoB siRNA sequence
tttctgatatacatcacggagtt

SEQ ID NO: 13856 - DNA, 23 bp, Artificial Sequence
  human ApoB siRNA sequence
ttctgatatacatcacggagtta

SEQ ID NO: 13857 - DNA, 23 bp, Artificial Sequence
  human ApoB siRNA sequence
tctgatatacatcacggagttac

SEQ ID NO: 13858 - DNA, 23 bp, Artificial Sequence
  human ApoB siRNA sequence
ctgatatacatcacggagttact

SEQ ID NO: 13859 - DNA, 23 bp, Artificial Sequence
  human ApoB siRNA sequence
tgatatacatcacggagttactg

SEQ ID NO: 13860 - DNA, 23 bp, Artificial Sequence
  human ApoB siRNA sequence
gatatacatcacggagttactga

SEQ ID NO: 13861 - DNA, 23 bp, Artificial Sequence
  human ApoB siRNA sequence
atatacatcacggagttactgaa

SEQ ID NO: 13862 - DNA, 23 bp, Artificial Sequence
  human ApoB siRNA sequence
tatacatcacggagttactgaaa

SEQ ID NO: 13863 - DNA, 23 bp, Artificial Sequence
  human ApoB siRNA sequence
atacatcacggagttactgaaaa

SEQ ID NO: 13864 - DNA, 23 bp, Artificial Sequence
  human ApoB siRNA sequence
tacatcacggagttactgaaaaa

SEQ ID NO: 13865 - DNA, 23 bp, Artificial Sequence
  human ApoB siRNA sequence
acatcacggagttactgaaaaag

SEQ ID NO: 13866 - DNA, 23 bp, Artificial Sequence
  human ApoB siRNA sequence
catcacggagttactgaaaaagc

SEQ ID NO: 13867 - DNA, 23 bp, Artificial Sequence
  human ApoB siRNA sequence
atcacggagttactgaaaaagct

SEQ ID NO: 13868 - DNA, 23 bp, Artificial Sequence
  human ApoB siRNA sequence
tcacggagttactgaaaaagctg

SEQ ID NO: 13869 - DNA, 23 bp, Artificial Sequence
  human ApoB siRNA sequence
cacggagttactgaaaaagctgc

SEQ ID NO: 13870 - DNA, 23 bp, Artificial Sequence
  human ApoB siRNA sequence
acggagttactgaaaaagctgca

SEQ ID NO: 13871 - DNA, 23 bp, Artificial Sequence
  human ApoB siRNA sequence
cggagttactgaaaaagctgcaa

SEQ ID NO: 13872 - DNA, 23 bp, Artificial Sequence
  human ApoB siRNA sequence
ggagttactgaaaaagctgcaat

SEQ ID NO: 13873 - DNA, 23 bp, Artificial Sequence
  human ApoB siRNA sequence
gagttactgaaaaagctgcaatc

SEQ ID NO: 13874 - DNA, 23 bp, Artificial Sequence
  human ApoB siRNA sequence
agttactgaaaaagctgcaatca

SEQ ID NO: 13875 - DNA, 23 bp, Artificial Sequence
  human ApoB siRNA sequence
gttactgaaaaagctgcaatcaa

SEQ ID NO: 13876 - DNA, 23 bp, Artificial Sequence
  human ApoB siRNA sequence
ttactgaaaaagctgcaatcaac

SEQ ID NO: 13877 - DNA, 23 bp, Artificial Sequence
  human ApoB siRNA sequence
tactgaaaaagctgcaatcaacc

SEQ ID NO: 13878 - DNA, 23 bp, Artificial Sequence
  human ApoB siRNA sequence
actgaaaaagctgcaatcaacca

SEQ ID NO: 13879 - DNA, 23 bp, Artificial Sequence
  human ApoB siRNA sequence
ctgaaaaagctgcaatcaaccac

SEQ ID NO: 13880 - DNA, 23 bp, Artificial Sequence
  human ApoB siRNA sequence
tgaaaaagctgcaatcaaccaca

SEQ ID NO: 13881 - DNA, 23 bp, Artificial Sequence
  human ApoB siRNA sequence
gaaaaagctgcaatcaaccacag

SEQ ID NO: 13882 - DNA, 23 bp, Artificial Sequence
  human ApoB siRNA sequence
aaaaagctgcaatcaaccacagt

SEQ ID NO: 13883 - DNA, 23 bp, Artificial Sequence
  human ApoB siRNA sequence
aaaagctgcaatcaaccacagtc

SEQ ID NO: 13884 - DNA, 23 bp, Artificial Sequence
  human ApoB siRNA sequence
aaagctgcaatcaaccacagtca

SEQ ID NO: 13885 - DNA, 23 bp, Artificial Sequence
  human ApoB siRNA sequence
aagctgcaatcaaccacagtcat

SEQ ID NO: 13886 - DNA, 23 bp, Artificial Sequence
  human ApoB siRNA sequence
agctgcaatcaaccacagtcatg

SEQ ID NO: 13887 - DNA, 23 bp, Artificial Sequence
  human ApoB siRNA sequence
gctgcaatcaaccacagtcatga

SEQ ID NO: 13888 - DNA, 23 bp, Artificial Sequence
  human ApoB siRNA sequence
ctgcaatcaaccacagtcatgaa

SEQ ID NO: 13889 - DNA, 23 bp, Artificial Sequence
  human ApoB siRNA sequence
tgcaatcaaccacagtcatgaac

SEQ ID NO: 13890 - DNA, 23 bp, Artificial Sequence
  human ApoB siRNA sequence
gcaatcaaccacagtcatgaacc

SEQ ID NO: 13891 - DNA, 23 bp, Artificial Sequence
  human ApoB siRNA sequence
caatcaaccacagtcatgaaccc

SEQ ID NO: 13892 - DNA, 23 bp, Artificial Sequence
  human ApoB siRNA sequence
aatcaaccacagtcatgaacccc

SEQ ID NO: 13893 - DNA, 23 bp, Artificial Sequence
  human ApoB siRNA sequence
atcaaccacagtcatgaacccct

SEQ ID NO: 13894 - DNA, 23 bp, Artificial Sequence
  human ApoB siRNA sequence
tcaaccacagtcatgaaccccta

SEQ ID NO: 13895 - DNA, 23 bp, Artificial Sequence
  human ApoB siRNA sequence
caaccacagtcatgaacccctac

SEQ ID NO: 13896 - DNA, 23 bp, Artificial Sequence
  human ApoB siRNA sequence
aaccacagtcatgaacccctaca

SEQ ID NO: 13897 - DNA, 23 bp, Artificial Sequence
  human ApoB siRNA sequence
accacagtcatgaacccctacat

SEQ ID NO: 13898 - DNA, 23 bp, Artificial Sequence
  human ApoB siRNA sequence
ccacagtcatgaacccctacatg

SEQ ID NO: 13899 - DNA, 23 bp, Artificial Sequence
  human ApoB siRNA sequence
cacagtcatgaacccctacatga

SEQ ID NO: 13900 - DNA, 23 bp, Artificial Sequence
  human ApoB siRNA sequence
acagtcatgaacccctacatgaa

SEQ ID NO: 13901 - DNA, 23 bp, Artificial Sequence
  human ApoB siRNA sequence
cagtcatgaacccctacatgaag

SEQ ID NO: 13902 - DNA, 23 bp, Artificial Sequence
  human ApoB siRNA sequence
agtcatgaacccctacatgaagc

SEQ ID NO: 13903 - DNA, 23 bp, Artificial Sequence
  human ApoB siRNA sequence
gtcatgaacccctacatgaagct

SEQ ID NO: 13904 - DNA, 23 bp, Artificial Sequence
  human ApoB siRNA sequence
tcatgaacccctacatgaagctt

SEQ ID NO: 13905 - DNA, 23 bp, Artificial Sequence
  human ApoB siRNA sequence
catgaacccctacatgaagcttg

SEQ ID NO: 13906 - DNA, 23 bp, Artificial Sequence
  human ApoB siRNA sequence
atgaacccctacatgaagcttgc

SEQ ID NO: 13907 - DNA, 23 bp, Artificial Sequence
  human ApoB siRNA sequence
tgaacccctacatgaagcttgct

SEQ ID NO: 13908 - DNA, 23 bp, Artificial Sequence
  human ApoB siRNA sequence
gaacccctacatgaagcttgctc

SEQ ID NO: 13909 - DNA, 23 bp, Artificial Sequence
  human ApoB siRNA sequence
aacccctacatgaagcttgctcc

SEQ ID NO: 13910 - DNA, 23 bp, Artificial Sequence
  human ApoB siRNA sequence
acccctacatgaagcttgctcca

SEQ ID NO: 13911 - DNA, 23 bp, Artificial Sequence
  human ApoB siRNA sequence
cccctacatgaagcttgctccag

SEQ ID NO: 13912 - DNA, 23 bp, Artificial Sequence
  human ApoB siRNA sequence
ccctacatgaagcttgctccagg

SEQ ID NO: 13913 - DNA, 23 bp, Artificial Sequence
  human ApoB siRNA sequence
cctacatgaagcttgctccagga

SEQ ID NO: 13914 - DNA, 23 bp, Artificial Sequence
  human ApoB siRNA sequence
ctacatgaagcttgctccaggag

SEQ ID NO: 13915 - DNA, 23 bp, Artificial Sequence
  human ApoB siRNA sequence
tacatgaagcttgctccaggaga

SEQ ID NO: 13916 - DNA, 23 bp, Artificial Sequence
  human ApoB siRNA sequence
acatgaagcttgctccaggagaa

SEQ ID NO: 13917 - DNA, 23 bp, Artificial Sequence
  human ApoB siRNA sequence
catgaagcttgctccaggagaac

SEQ ID NO: 13918 - DNA, 23 bp, Artificial Sequence
  human ApoB siRNA sequence
atgaagcttgctccaggagaact

SEQ ID NO: 13919 - DNA, 23 bp, Artificial Sequence
  human ApoB siRNA sequence
tgaagcttgctccaggagaactt

SEQ ID NO: 13920 - DNA, 23 bp, Artificial Sequence
  human ApoB siRNA sequence
gaagcttgctccaggagaactta

SEQ ID NO: 13921 - DNA, 23 bp, Artificial Sequence
  human ApoB siRNA sequence
aagcttgctccaggagaacttac

SEQ ID NO: 13922 - DNA, 23 bp, Artificial Sequence
  human ApoB siRNA sequence
agcttgctccaggagaacttact

SEQ ID NO: 13923 - DNA, 23 bp, Artificial Sequence
  human ApoB siRNA sequence
gcttgctccaggagaacttacta

SEQ ID NO: 13924 - DNA, 23 bp, Artificial Sequence
  human ApoB siRNA sequence
cttgctccaggagaacttactat

SEQ ID NO: 13925 - DNA, 23 bp, Artificial Sequence
  human ApoB siRNA sequence
ttgctccaggagaacttactatc

SEQ ID NO: 13926 - DNA, 23 bp, Artificial Sequence
  human ApoB siRNA sequence
tgctccaggagaacttactatca

SEQ ID NO: 13927 - DNA, 23 bp, Artificial Sequence
  human ApoB siRNA sequence
gctccaggagaacttactatcat

SEQ ID NO: 13928 - DNA, 23 bp, Artificial Sequence
  human ApoB siRNA sequence
ctccaggagaacttactatcatc

SEQ ID NO: 13929 - DNA, 23 bp, Artificial Sequence
  human ApoB siRNA sequence
tccaggagaacttactatcatcc

SEQ ID NO: 13930 - DNA, 23 bp, Artificial Sequence
  human ApoB siRNA sequence
ccaggagaacttactatcatcct

SEQ ID NO: 13931 - DNA, 23 bp, Artificial Sequence
  human ApoB siRNA sequence
caggagaacttactatcatcctc

SEQ ID NO: 13932 - DNA, 23 bp, Artificial Sequence
  human ApoB siRNA sequence
aggagaacttactatcatcctct

SEQ ID NO: 13933 - DNA, 23 bp, Artificial Sequence
  human ApoB siRNA sequence
ggagaacttactatcatcctcta

SEQ ID NO: 13934 - DNA, 23 bp, Artificial Sequence
  human ApoB siRNA sequence
ttttttaaaagaaatcttcattt

SEQ ID NO: 13935 - DNA, 23 bp, Artificial Sequence
  human ApoB siRNA sequence
tttttaaaagaaatcttcattta

SEQ ID NO: 13936 - DNA, 23 bp, Artificial Sequence
  human ApoB siRNA sequence
ttttaaaagaaatcttcatttat

SEQ ID NO: 13937 - DNA, 23 bp, Artificial Sequence
  human ApoB siRNA sequence
tttaaaagaaatcttcatttatt

SEQ ID NO: 13938 - DNA, 23 bp, Artificial Sequence
  human ApoB siRNA sequence
ttaaaagaaatcttcatttattc

SEQ ID NO: 13939 - DNA, 23 bp, Artificial Sequence
  human ApoB siRNA sequence
taaaagaaatcttcatttattct

SEQ ID NO: 13940 - DNA, 23 bp, Artificial Sequence
  human ApoB siRNA sequence
aaaagaaatcttcatttattctt

SEQ ID NO: 13941 - DNA, 23 bp, Artificial Sequence
  human ApoB siRNA sequence
aaagaaatcttcatttattcttc

SEQ ID NO: 13942 - DNA, 23 bp, Artificial Sequence
  human ApoB siRNA sequence
aagaaatcttcatttattcttct

SEQ ID NO: 13943 - DNA, 23 bp, Artificial Sequence
  human ApoB siRNA sequence
agaaatcttcatttattcttctt

SEQ ID NO: 13944 - DNA, 23 bp, Artificial Sequence
  human ApoB siRNA sequence
gaaatcttcatttattcttcttt

SEQ ID NO: 13945 - DNA, 23 bp, Artificial Sequence
  human ApoB siRNA sequence
aaatcttcatttattcttctttt

SEQ ID NO: 13946 - DNA, 23 bp, Artificial Sequence
  human ApoB siRNA sequence
aatcttcatttattcttcttttc

SEQ ID NO: 13947 - DNA, 23 bp, Artificial Sequence
  human ApoB siRNA sequence
atcttcatttattcttcttttcc

SEQ ID NO: 13948 - DNA, 23 bp, Artificial Sequence
  human ApoB siRNA sequence
tcttcatttattcttcttttcca

SEQ ID NO: 13949 - DNA, 23 bp, Artificial Sequence
  human ApoB siRNA sequence
cttcatttattcttcttttccaa

SEQ ID NO: 13950 - DNA, 23 bp, Artificial Sequence
  human ApoB siRNA sequence
ttcatttattcttcttttccaat

SEQ ID NO: 13951 - DNA, 23 bp, Artificial Sequence
  human ApoB siRNA sequence
tcatttattcttcttttccaatt

SEQ ID NO: 13952 - DNA, 23 bp, Artificial Sequence
  human ApoB siRNA sequence
catttattcttcttttccaattg

SEQ ID NO: 13953 - DNA, 23 bp, Artificial Sequence
  human ApoB siRNA sequence
atttattcttcttttccaattga

SEQ ID NO: 13954 - DNA, 23 bp, Artificial Sequence
  human ApoB siRNA sequence
tttattcttcttttccaattgaa

SEQ ID NO: 13955 - DNA, 23 bp, Artificial Sequence
  human ApoB siRNA sequence
ttattcttcttttccaattgaac

SEQ ID NO: 13956 - DNA, 23 bp, Artificial Sequence
  human ApoB siRNA sequence
tattcttcttttccaattgaact

SEQ ID NO: 13957 - DNA, 23 bp, Artificial Sequence
  human ApoB siRNA sequence
attcttcttttccaattgaactt

SEQ ID NO: 13958 - DNA, 23 bp, Artificial Sequence
  human ApoB siRNA sequence
ttcttcttttccaattgaacttt

SEQ ID NO: 13959 - DNA, 23 bp, Artificial Sequence
  human ApoB siRNA sequence
tcttcttttccaattgaactttc

SEQ ID NO: 13960 - DNA, 23 bp, Artificial Sequence
  human ApoB siRNA sequence
cttcttttccaattgaactttca

SEQ ID NO: 13961 - DNA, 23 bp, Artificial Sequence
  human ApoB siRNA sequence
ttcttttccaattgaactttcac

SEQ ID NO: 13962 - DNA, 23 bp, Artificial Sequence
  human ApoB siRNA sequence
tcttttccaattgaactttcaca

SEQ ID NO: 13963 - DNA, 23 bp, Artificial Sequence
  human ApoB siRNA sequence
cttttccaattgaactttcacat

SEQ ID NO: 13964 - DNA, 23 bp, Artificial Sequence
  human ApoB siRNA sequence
ttttccaattgaactttcacata

SEQ ID NO: 13965 - DNA, 23 bp, Artificial Sequence
  human ApoB siRNA sequence
tttccaattgaactttcacatag

SEQ ID NO: 13966 - DNA, 23 bp, Artificial Sequence
  human ApoB siRNA sequence
ttccaattgaactttcacatagc

SEQ ID NO: 13967 - DNA, 23 bp, Artificial Sequence
  human ApoB siRNA sequence
tccaattgaactttcacatagca

SEQ ID NO: 13968 - DNA, 23 bp, Artificial Sequence
  human ApoB siRNA sequence
ccaattgaactttcacatagcac

SEQ ID NO: 13969 - DNA, 23 bp, Artificial Sequence
  human ApoB siRNA sequence
caattgaactttcacatagcaca

SEQ ID NO: 13970 - DNA, 23 bp, Artificial Sequence
  human ApoB siRNA sequence
aattgaactttcacatagcacag

SEQ ID NO: 13971 - DNA, 23 bp, Artificial Sequence
  human ApoB siRNA sequence
attgaactttcacatagcacaga

SEQ ID NO: 13972 - DNA, 23 bp, Artificial Sequence
  human ApoB siRNA sequence
ttgaactttcacatagcacagaa

SEQ ID NO: 13973 - DNA, 23 bp, Artificial Sequence
  human ApoB siRNA sequence
tgaactttcacatagcacagaaa

SEQ ID NO: 13974 - DNA, 23 bp, Artificial Sequence
  human ApoB siRNA sequence
gaactttcacatagcacagaaaa

SEQ ID NO: 13975 - DNA, 23 bp, Artificial Sequence
  human ApoB siRNA sequence
aactttcacatagcacagaaaaa

SEQ ID NO: 13976 - DNA, 23 bp, Artificial Sequence
  human ApoB siRNA sequence
actttcacatagcacagaaaaaa

SEQ ID NO: 13977 - DNA, 23 bp, Artificial Sequence
  human ApoB siRNA sequence
ctttcacatagcacagaaaaaat

SEQ ID NO: 13978 - DNA, 23 bp, Artificial Sequence
  human ApoB siRNA sequence
tttcacatagcacagaaaaaatt

SEQ ID NO: 13979 - DNA, 23 bp, Artificial Sequence
  human ApoB siRNA sequence
ttcacatagcacagaaaaaattc

SEQ ID NO: 13980 - DNA, 23 bp, Artificial Sequence
  human ApoB siRNA sequence
tcacatagcacagaaaaaattca

SEQ ID NO: 13981 - DNA, 23 bp, Artificial Sequence
  human ApoB siRNA sequence
cacatagcacagaaaaaattcaa

SEQ ID NO: 13982 - DNA, 23 bp, Artificial Sequence
  human ApoB siRNA sequence
acatagcacagaaaaaattcaaa

SEQ ID NO: 13983 - DNA, 23 bp, Artificial Sequence
  human ApoB siRNA sequence
catagcacagaaaaaattcaaac

SEQ ID NO: 13984 - DNA, 23 bp, Artificial Sequence
  human ApoB siRNA sequence
atagcacagaaaaaattcaaact

SEQ ID NO: 13985 - DNA, 23 bp, Artificial Sequence
  human ApoB siRNA sequence
tagcacagaaaaaattcaaactg

SEQ ID NO: 13986 - DNA, 23 bp, Artificial Sequence
  human ApoB siRNA sequence
agcacagaaaaaattcaaactgc

SEQ ID NO: 13987 - DNA, 23 bp, Artificial Sequence
  human ApoB siRNA sequence
gcacagaaaaaattcaaactgcc

SEQ ID NO: 13988 - DNA, 23 bp, Artificial Sequence
  human ApoB siRNA sequence
cacagaaaaaattcaaactgcct

SEQ ID NO: 13989 - DNA, 23 bp, Artificial Sequence
  human ApoB siRNA sequence
acagaaaaaattcaaactgccta

SEQ ID NO: 13990 - DNA, 23 bp, Artificial Sequence
  human ApoB siRNA sequence
cagaaaaaattcaaactgcctat

SEQ ID NO: 13991 - DNA, 23 bp, Artificial Sequence
  human ApoB siRNA sequence
agaaaaaattcaaactgcctata

SEQ ID NO: 13992 - DNA, 23 bp, Artificial Sequence
  human ApoB siRNA sequence
gaaaaaattcaaactgcctatat

SEQ ID NO: 13993 - DNA, 23 bp, Artificial Sequence
  human ApoB siRNA sequence
aaaaaattcaaactgcctatatt

SEQ ID NO: 13994 - DNA, 23 bp, Artificial Sequence
  human ApoB siRNA sequence
aaaaattcaaactgcctatattg

SEQ ID NO: 13995 - DNA, 23 bp, Artificial Sequence
  human ApoB siRNA sequence
aaaattcaaactgcctatattga

SEQ ID NO: 13996 - DNA, 23 bp, Artificial Sequence
  human ApoB siRNA sequence
aaattcaaactgcctatattgat

SEQ ID NO: 13997 - DNA, 23 bp, Artificial Sequence
  human ApoB siRNA sequence
aattcaaactgcctatattgata

SEQ ID NO: 13998 - DNA, 23 bp, Artificial Sequence
  human ApoB siRNA sequence
attcaaactgcctatattgataa

SEQ ID NO: 13999 - DNA, 23 bp, Artificial Sequence
  human ApoB siRNA sequence
ttcaaactgcctatattgataaa

SEQ ID NO: 14000 - DNA, 23 bp, Artificial Sequence
  human ApoB siRNA sequence
tcaaactgcctatattgataaaa

SEQ ID NO: 14001 - DNA, 23 bp, Artificial Sequence
  human ApoB siRNA sequence
caaactgcctatattgataaaac

SEQ ID NO: 14002 - DNA, 23 bp, Artificial Sequence
  human ApoB siRNA sequence
aaactgcctatattgataaaacc

SEQ ID NO: 14003 - DNA, 23 bp, Artificial Sequence
  human ApoB siRNA sequence
aactgcctatattgataaaacca

SEQ ID NO: 14004 - DNA, 23 bp, Artificial Sequence
  human ApoB siRNA sequence
actgcctatattgataaaaccat

SEQ ID NO: 14005 - DNA, 23 bp, Artificial Sequence
  human ApoB siRNA sequence
ctgcctatattgataaaaccata

SEQ ID NO: 14006 - DNA, 23 bp, Artificial Sequence
  human ApoB siRNA sequence
tgcctatattgataaaaccatac

SEQ ID NO: 14007 - DNA, 23 bp, Artificial Sequence
  human ApoB siRNA sequence
gcctatattgataaaaccataca

SEQ ID NO: 14008 - DNA, 23 bp, Artificial Sequence
  human ApoB siRNA sequence
cctatattgataaaaccatacag

SEQ ID NO: 14009 - DNA, 23 bp, Artificial Sequence
  human ApoB siRNA sequence
ctatattgataaaaccatacagt

SEQ ID NO: 14010 - DNA, 23 bp, Artificial Sequence
  human ApoB siRNA sequence
tatattgataaaaccatacagtg

SEQ ID NO: 14011 - DNA, 23 bp, Artificial Sequence
  human ApoB siRNA sequence
atattgataaaaccatacagtga

SEQ ID NO: 14012 - DNA, 23 bp, Artificial Sequence
  human ApoB siRNA sequence
tattgataaaaccatacagtgag

SEQ ID NO: 14013 - DNA, 23 bp, Artificial Sequence
  human ApoB siRNA sequence
attgataaaaccatacagtgagc

SEQ ID NO: 14014 - DNA, 23 bp, Artificial Sequence
  human ApoB siRNA sequence
ttgataaaaccatacagtgagcc

SEQ ID NO: 14015 - DNA, 23 bp, Artificial Sequence
  human ApoB siRNA sequence
tgataaaaccatacagtgagcca

SEQ ID NO: 14016 - DNA, 23 bp, Artificial Sequence
  human ApoB siRNA sequence
gataaaaccatacagtgagccag

SEQ ID NO: 14017 - DNA, 23 bp, Artificial Sequence
  human ApoB siRNA sequence
ataaaaccatacagtgagccagc

SEQ ID NO: 14018 - DNA, 23 bp, Artificial Sequence
  human ApoB siRNA sequence
taaaaccatacagtgagccagcc

SEQ ID NO: 14019 - DNA, 23 bp, Artificial Sequence
  human ApoB siRNA sequence
aaaaccatacagtgagccagcct

SEQ ID NO: 14020 - DNA, 23 bp, Artificial Sequence
  human ApoB siRNA sequence
aaaccatacagtgagccagcctt

SEQ ID NO: 14021 - DNA, 23 bp, Artificial Sequence
  human ApoB siRNA sequence
aaccatacagtgagccagccttg

SEQ ID NO: 14022 - DNA, 23 bp, Artificial Sequence
  human ApoB siRNA sequence
accatacagtgagccagccttgc

SEQ ID NO: 14023 - DNA, 23 bp, Artificial Sequence
  human ApoB siRNA sequence
ccatacagtgagccagccttgca

SEQ ID NO: 14024 - DNA, 23 bp, Artificial Sequence
  human ApoB siRNA sequence
catacagtgagccagccttgcag

SEQ ID NO: 14025 - DNA, 23 bp, Artificial Sequence
  human ApoB siRNA sequence
atacagtgagccagccttgcagt

SEQ ID NO: 14026 - DNA, 23 bp, Artificial Sequence
  human ApoB siRNA sequence
tacagtgagccagccttgcagta

SEQ ID NO: 14027 - DNA, 23 bp, Artificial Sequence
  human ApoB siRNA sequence
acagtgagccagccttgcagtag

SEQ ID NO: 14028 - DNA, 23 bp, Artificial Sequence
  human ApoB siRNA sequence
cagtgagccagccttgcagtagg

SEQ ID NO: 14029 - DNA, 23 bp, Artificial Sequence
  human ApoB siRNA sequence
agtgagccagccttgcagtaggc

SEQ ID NO: 14030 - DNA, 23 bp, Artificial Sequence
  human ApoB siRNA sequence
gtgagccagccttgcagtaggca

SEQ ID NO: 14031 - DNA, 23 bp, Artificial Sequence
  human ApoB siRNA sequence
tgagccagccttgcagtaggcag

SEQ ID NO: 14032 - DNA, 23 bp, Artificial Sequence
  human ApoB siRNA sequence
gagccagccttgcagtaggcagt

SEQ ID NO: 14033 - DNA, 23 bp, Artificial Sequence
  human ApoB siRNA sequence
agccagccttgcagtaggcagta

SEQ ID NO: 14034 - DNA, 23 bp, Artificial Sequence
  human ApoB siRNA sequence
gccagccttgcagtaggcagtag

SEQ ID NO: 14035 - DNA, 23 bp, Artificial Sequence
  human ApoB siRNA sequence
ccagccttgcagtaggcagtaga

SEQ ID NO: 14036 - DNA, 23 bp, Artificial Sequence
  human ApoB siRNA sequence
cagccttgcagtaggcagtagac

SEQ ID NO: 14037 - DNA, 23 bp, Artificial Sequence
  human ApoB siRNA sequence
agccttgcagtaggcagtagact

SEQ ID NO: 14038 - DNA, 23 bp, Artificial Sequence
  human ApoB siRNA sequence
gccttgcagtaggcagtagacta

SEQ ID NO: 14039 - DNA, 23 bp, Artificial Sequence
  human ApoB siRNA sequence
ccttgcagtaggcagtagactat

SEQ ID NO: 14040 - DNA, 23 bp, Artificial Sequence
  human ApoB siRNA sequence
cttgcagtaggcagtagactata

SEQ ID NO: 14041 - DNA, 23 bp, Artificial Sequence
  human ApoB siRNA sequence
ttgcagtaggcagtagactataa

SEQ ID NO: 14042 - DNA, 23 bp, Artificial Sequence
  human ApoB siRNA sequence
tgcagtaggcagtagactataag

SEQ ID NO: 14043 - DNA, 23 bp, Artificial Sequence
  human ApoB siRNA sequence
gcagtaggcagtagactataagc

SEQ ID NO: 14044 - DNA, 23 bp, Artificial Sequence
  human ApoB siRNA sequence
cagtaggcagtagactataagca

SEQ ID NO: 14045 - DNA, 23 bp, Artificial Sequence
  human ApoB siRNA sequence
agtaggcagtagactataagcag

SEQ ID NO: 14046 - DNA, 23 bp, Artificial Sequence
  human ApoB siRNA sequence
gtaggcagtagactataagcaga

SEQ ID NO: 14047 - DNA, 23 bp, Artificial Sequence
  human ApoB siRNA sequence
taggcagtagactataagcagaa

SEQ ID NO: 14048 - DNA, 23 bp, Artificial Sequence
  human ApoB siRNA sequence
aggcagtagactataagcagaag

SEQ ID NO: 14049 - DNA, 23 bp, Artificial Sequence
  human ApoB siRNA sequence
ggcagtagactataagcagaagc

SEQ ID NO: 14050 - DNA, 23 bp, Artificial Sequence
  human ApoB siRNA sequence
gcagtagactataagcagaagca

SEQ ID NO: 14051 - DNA, 23 bp, Artificial Sequence
  human ApoB siRNA sequence
cagtagactataagcagaagcac

SEQ ID NO: 14052 - DNA, 23 bp, Artificial Sequence
  human ApoB siRNA sequence
agtagactataagcagaagcaca

SEQ ID NO: 14053 - DNA, 23 bp, Artificial Sequence
  human ApoB siRNA sequence
gtagactataagcagaagcacat

SEQ ID NO: 14054 - DNA, 23 bp, Artificial Sequence
  human ApoB siRNA sequence
tagactataagcagaagcacata

SEQ ID NO: 14055 - DNA, 23 bp, Artificial Sequence
  human ApoB siRNA sequence
agactataagcagaagcacatat

SEQ ID NO: 14056 - DNA, 23 bp, Artificial Sequence
  human ApoB siRNA sequence
gactataagcagaagcacatatg

SEQ ID NO: 14057 - DNA, 23 bp, Artificial Sequence
  human ApoB siRNA sequence
actataagcagaagcacatatga

SEQ ID NO: 14058 - DNA, 23 bp, Artificial Sequence
  human ApoB siRNA sequence
ctataagcagaagcacatatgaa

SEQ ID NO: 14059 - DNA, 23 bp, Artificial Sequence
  human ApoB siRNA sequence
tataagcagaagcacatatgaac

SEQ ID NO: 14060 - DNA, 23 bp, Artificial Sequence
  human ApoB siRNA sequence
ataagcagaagcacatatgaact

SEQ ID NO: 14061 - DNA, 23 bp, Artificial Sequence
  human ApoB siRNA sequence
taagcagaagcacatatgaactg

SEQ ID NO: 14062 - DNA, 23 bp, Artificial Sequence
  human ApoB siRNA sequence
aagcagaagcacatatgaactgg

SEQ ID NO: 14063 - DNA, 23 bp, Artificial Sequence
  human ApoB siRNA sequence
agcagaagcacatatgaactgga

SEQ ID NO: 14064 - DNA, 23 bp, Artificial Sequence
  human ApoB siRNA sequence
gcagaagcacatatgaactggac

SEQ ID NO: 14065 - DNA, 23 bp, Artificial Sequence
  human ApoB siRNA sequence
cagaagcacatatgaactggacc

SEQ ID NO: 14066 - DNA, 23 bp, Artificial Sequence
  human ApoB siRNA sequence
agaagcacatatgaactggacct

SEQ ID NO: 14067 - DNA, 23 bp, Artificial Sequence
  human ApoB siRNA sequence
gaagcacatatgaactggacctg

SEQ ID NO: 14068 - DNA, 23 bp, Artificial Sequence
  human ApoB siRNA sequence
aagcacatatgaactggacctgc

SEQ ID NO: 14069 - DNA, 23 bp, Artificial Sequence
  human ApoB siRNA sequence
agcacatatgaactggacctgca

SEQ ID NO: 14070 - DNA, 23 bp, Artificial Sequence
  human ApoB siRNA sequence
gcacatatgaactggacctgcac

SEQ ID NO: 14071 - DNA, 23 bp, Artificial Sequence
  human ApoB siRNA sequence
cacatatgaactggacctgcacc

SEQ ID NO: 14072 - DNA, 23 bp, Artificial Sequence
  human ApoB siRNA sequence
acatatgaactggacctgcacca

SEQ ID NO: 14073 - DNA, 23 bp, Artificial Sequence
  human ApoB siRNA sequence
catatgaactggacctgcaccaa

SEQ ID NO: 14074 - DNA, 23 bp, Artificial Sequence
  human ApoB siRNA sequence
atatgaactggacctgcaccaaa

SEQ ID NO: 14075 - DNA, 23 bp, Artificial Sequence
  human ApoB siRNA sequence
tatgaactggacctgcaccaaag

SEQ ID NO: 14076 - DNA, 23 bp, Artificial Sequence
  human ApoB siRNA sequence
atgaactggacctgcaccaaagc

SEQ ID NO: 14077 - DNA, 23 bp, Artificial Sequence
  human ApoB siRNA sequence
tgaactggacctgcaccaaagct

SEQ ID NO: 14078 - DNA, 23 bp, Artificial Sequence
  human ApoB siRNA sequence
gaactggacctgcaccaaagctg

SEQ ID NO: 14079 - DNA, 23 bp, Artificial Sequence
  human ApoB siRNA sequence
aactggacctgcaccaaagctgg

SEQ ID NO: 14080 - DNA, 23 bp, Artificial Sequence
  human ApoB siRNA sequence
actggacctgcaccaaagctggc

SEQ ID NO: 14081 - DNA, 23 bp, Artificial Sequence
  human ApoB siRNA sequence
ctggacctgcaccaaagctggca

SEQ ID NO: 14082 - DNA, 23 bp, Artificial Sequence
  human ApoB siRNA sequence
tggacctgcaccaaagctggcac

SEQ ID NO: 14083 - DNA, 23 bp, Artificial Sequence
  human ApoB siRNA sequence
ggacctgcaccaaagctggcacc

SEQ ID NO: 14084 - DNA, 23 bp, Artificial Sequence
  human ApoB siRNA sequence
gacctgcaccaaagctggcacca

SEQ ID NO: 14085 - DNA, 23 bp, Artificial Sequence
  human ApoB siRNA sequence
acctgcaccaaagctggcaccag

SEQ ID NO: 14086 - DNA, 23 bp, Artificial Sequence
  human ApoB siRNA sequence
cctgcaccaaagctggcaccagg

SEQ ID NO: 14087 - DNA, 23 bp, Artificial Sequence
  human ApoB siRNA sequence
ctgcaccaaagctggcaccaggg

SEQ ID NO: 14088 - DNA, 23 bp, Artificial Sequence
  human ApoB siRNA sequence
tgcaccaaagctggcaccagggc

SEQ ID NO: 14089 - DNA, 23 bp, Artificial Sequence
  human ApoB siRNA sequence
gcaccaaagctggcaccagggct

SEQ ID NO: 14090 - DNA, 23 bp, Artificial Sequence
  human ApoB siRNA sequence
caccaaagctggcaccagggctc

SEQ ID NO: 14091 - DNA, 23 bp, Artificial Sequence
  human ApoB siRNA sequence
accaaagctggcaccagggctcg

SEQ ID NO: 14092 - DNA, 23 bp, Artificial Sequence
  human ApoB siRNA sequence
ccaaagctggcaccagggctcgg

SEQ ID NO: 14093 - DNA, 23 bp, Artificial Sequence
  human ApoB siRNA sequence
caaagctggcaccagggctcgga

SEQ ID NO: 14094 - DNA, 23 bp, Artificial Sequence
  human ApoB siRNA sequence
aaagctggcaccagggctcggaa

SEQ ID NO: 14095 - DNA, 23 bp, Artificial Sequence
  human ApoB siRNA sequence
aagctggcaccagggctcggaag

SEQ ID NO: 14096 - DNA, 23 bp, Artificial Sequence
  human ApoB siRNA sequence
agctggcaccagggctcggaagg

SEQ ID NO: 14097 - DNA, 23 bp, Artificial Sequence
  human ApoB siRNA sequence
gctggcaccagggctcggaaggt

SEQ ID NO: 14098 - DNA, 23 bp, Artificial Sequence
  human ApoB siRNA sequence
ctggcaccagggctcggaaggtc

SEQ ID NO: 14099 - DNA, 23 bp, Artificial Sequence
  human ApoB siRNA sequence
tggcaccagggctcggaaggtct

SEQ ID NO: 14100 - DNA, 23 bp, Artificial Sequence
  human ApoB siRNA sequence
ggcaccagggctcggaaggtctc

SEQ ID NO: 14101 - DNA, 23 bp, Artificial Sequence
  human ApoB siRNA sequence
gcaccagggctcggaaggtctct

SEQ ID NO: 14102 - DNA, 23 bp, Artificial Sequence
  human ApoB siRNA sequence
caccagggctcggaaggtctctg

SEQ ID NO: 14103 - DNA, 23 bp, Artificial Sequence
  human ApoB siRNA sequence
accagggctcggaaggtctctga

SEQ ID NO: 14104 - DNA, 23 bp, Artificial Sequence
  human ApoB siRNA sequence
ccagggctcggaaggtctctgaa

SEQ ID NO: 14105 - DNA, 23 bp, Artificial Sequence
  human ApoB siRNA sequence
cagggctcggaaggtctctgaac

SEQ ID NO: 14106 - DNA, 23 bp, Artificial Sequence
  human ApoB siRNA sequence
agggctcggaaggtctctgaact

SEQ ID NO: 14107 - DNA, 23 bp, Artificial Sequence
  human ApoB siRNA sequence
gggctcggaaggtctctgaactc

SEQ ID NO: 14108 - DNA, 23 bp, Artificial Sequence
  human ApoB siRNA sequence
ggctcggaaggtctctgaactca

SEQ ID NO: 14109 - DNA, 23 bp, Artificial Sequence
  human ApoB siRNA sequence
gctcggaaggtctctgaactcag

SEQ ID NO: 14110 - DNA, 23 bp, Artificial Sequence
  human ApoB siRNA sequence
ctcggaaggtctctgaactcaga

SEQ ID NO: 14111 - DNA, 23 bp, Artificial Sequence
  human ApoB siRNA sequence
tcggaaggtctctgaactcagaa

SEQ ID NO: 14112 - DNA, 23 bp, Artificial Sequence
  human ApoB siRNA sequence
cggaaggtctctgaactcagaag

SEQ ID NO: 14113 - DNA, 23 bp, Artificial Sequence
  human ApoB siRNA sequence
ggaaggtctctgaactcagaagg

SEQ ID NO: 14114 - DNA, 23 bp, Artificial Sequence
  human ApoB siRNA sequence
gaaggtctctgaactcagaagga

SEQ ID NO: 14115 - DNA, 23 bp, Artificial Sequence
  human ApoB siRNA sequence
aaggtctctgaactcagaaggat

SEQ ID NO: 14116 - DNA, 23 bp, Artificial Sequence
  human ApoB siRNA sequence
aggtctctgaactcagaaggatg

SEQ ID NO: 14117 - DNA, 23 bp, Artificial Sequence
  human ApoB siRNA sequence
ggtctctgaactcagaaggatgg

SEQ ID NO: 14118 - DNA, 23 bp, Artificial Sequence
  human ApoB siRNA sequence
gtctctgaactcagaaggatggc

SEQ ID NO: 14119 - DNA, 23 bp, Artificial Sequence
  human ApoB siRNA sequence
tctctgaactcagaaggatggca

SEQ ID NO: 14120 - DNA, 23 bp, Artificial Sequence
  human ApoB siRNA sequence
ctctgaactcagaaggatggcat

SEQ ID NO: 14121 - DNA, 23 bp, Artificial Sequence
  human ApoB siRNA sequence
tctgaactcagaaggatggcatt

SEQ ID NO: 14122 - DNA, 23 bp, Artificial Sequence
  human ApoB siRNA sequence
ctgaactcagaaggatggcattt

SEQ ID NO: 14123 - DNA, 23 bp, Artificial Sequence
  human ApoB siRNA sequence
tgaactcagaaggatggcatttt

SEQ ID NO: 14124 - DNA, 23 bp, Artificial Sequence
  human ApoB siRNA sequence
gaactcagaaggatggcattttt

SEQ ID NO: 14125 - DNA, 23 bp, Artificial Sequence
  human ApoB siRNA sequence
aactcagaaggatggcatttttt

SEQ ID NO: 14126 - DNA, 23 bp, Artificial Sequence
  human ApoB siRNA sequence
actcagaaggatggcattttttg

SEQ ID NO: 14127 - DNA, 23 bp, Artificial Sequence
  human ApoB siRNA sequence
ctcagaaggatggcattttttgc

SEQ ID NO: 14128 - DNA, 23 bp, Artificial Sequence
  human ApoB siRNA sequence
tcagaaggatggcattttttgca

SEQ ID NO: 14129 - DNA, 23 bp, Artificial Sequence
  human ApoB siRNA sequence
cagaaggatggcattttttgcaa

SEQ ID NO: 14130 - DNA, 23 bp, Artificial Sequence
  human ApoB siRNA sequence
agaaggatggcattttttgcaag

SEQ ID NO: 14131 - DNA, 23 bp, Artificial Sequence
  human ApoB siRNA sequence
gaaggatggcattttttgcaagt

SEQ ID NO: 14132 - DNA, 23 bp, Artificial Sequence
  human ApoB siRNA sequence
aaggatggcattttttgcaagtt

SEQ ID NO: 14133 - DNA, 23 bp, Artificial Sequence
  human ApoB siRNA sequence
aggatggcattttttgcaagtta

SEQ ID NO: 14134 - DNA, 23 bp, Artificial Sequence
  human ApoB siRNA sequence
ggatggcattttttgcaagttaa

SEQ ID NO: 14135 - DNA, 23 bp, Artificial Sequence
  human ApoB siRNA sequence
gatggcattttttgcaagttaaa

SEQ ID NO: 14136 - DNA, 23 bp, Artificial Sequence
  human ApoB siRNA sequence
atggcattttttgcaagttaaag

SEQ ID NO: 14137 - DNA, 23 bp, Artificial Sequence
  human ApoB siRNA sequence
tggcattttttgcaagttaaaga

SEQ ID NO: 14138 - DNA, 23 bp, Artificial Sequence
  human ApoB siRNA sequence
ggcattttttgcaagttaaagaa

SEQ ID NO: 14139 - DNA, 23 bp, Artificial Sequence
  human ApoB siRNA sequence
gcattttttgcaagttaaagaaa

SEQ ID NO: 14140 - DNA, 23 bp, Artificial Sequence
  human ApoB siRNA sequence
cattttttgcaagttaaagaaaa

SEQ ID NO: 14141 - DNA, 23 bp, Artificial Sequence
  human ApoB siRNA sequence
attttttgcaagttaaagaaaat

SEQ ID NO: 14142 - DNA, 23 bp, Artificial Sequence
  human ApoB siRNA sequence
ttttttgcaagttaaagaaaatc

SEQ ID NO: 14143 - DNA, 23 bp, Artificial Sequence
  human ApoB siRNA sequence
tttttgcaagttaaagaaaatca

SEQ ID NO: 14144 - DNA, 23 bp, Artificial Sequence
  human ApoB siRNA sequence
ttttgcaagttaaagaaaatcag

SEQ ID NO: 14145 - DNA, 23 bp, Artificial Sequence
  human ApoB siRNA sequence
tttgcaagttaaagaaaatcagg

SEQ ID NO: 14146 - DNA, 23 bp, Artificial Sequence
  human ApoB siRNA sequence
ttgcaagttaaagaaaatcagga

SEQ ID NO: 14147 - DNA, 23 bp, Artificial Sequence
  human ApoB siRNA sequence
tgcaagttaaagaaaatcaggat

SEQ ID NO: 14148 - DNA, 23 bp, Artificial Sequence
  human ApoB siRNA sequence
gcaagttaaagaaaatcaggatc

SEQ ID NO: 14149 - DNA, 23 bp, Artificial Sequence
  human ApoB siRNA sequence
caagttaaagaaaatcaggatct

SEQ ID NO: 14150 - DNA, 23 bp, Artificial Sequence
  human ApoB siRNA sequence
aagttaaagaaaatcaggatctg

SEQ ID NO: 14151 - DNA, 23 bp, Artificial Sequence
  human ApoB siRNA sequence
agttaaagaaaatcaggatctga

SEQ ID NO: 14152 - DNA, 23 bp, Artificial Sequence
  human ApoB siRNA sequence
gttaaagaaaatcaggatctgag

SEQ ID NO: 14153 - DNA, 23 bp, Artificial Sequence
  human ApoB siRNA sequence
ttaaagaaaatcaggatctgagt

SEQ ID NO: 14154 - DNA, 23 bp, Artificial Sequence
  human ApoB siRNA sequence
taaagaaaatcaggatctgagtt

SEQ ID NO: 14155 - DNA, 23 bp, Artificial Sequence
  human ApoB siRNA sequence
aaagaaaatcaggatctgagtta

SEQ ID NO: 14156 - DNA, 23 bp, Artificial Sequence
  human ApoB siRNA sequence
aagaaaatcaggatctgagttat

SEQ ID NO: 14157 - DNA, 23 bp, Artificial Sequence
  human ApoB siRNA sequence
agaaaatcaggatctgagttatt

SEQ ID NO: 14158 - DNA, 23 bp, Artificial Sequence
  human ApoB siRNA sequence
gaaaatcaggatctgagttattt

SEQ ID NO: 14159 - DNA, 23 bp, Artificial Sequence
  human ApoB siRNA sequence
aaaatcaggatctgagttatttt

SEQ ID NO: 14160 - DNA, 23 bp, Artificial Sequence
  human ApoB siRNA sequence
aaatcaggatctgagttattttg

SEQ ID NO: 14161 - DNA, 23 bp, Artificial Sequence
  human ApoB siRNA sequence
aatcaggatctgagttattttgc

SEQ ID NO: 14162 - DNA, 23 bp, Artificial Sequence
  human ApoB siRNA sequence
atcaggatctgagttattttgct

SEQ ID NO: 14163 - DNA, 23 bp, Artificial Sequence
  human ApoB siRNA sequence
tcaggatctgagttattttgcta

SEQ ID NO: 14164 - DNA, 23 bp, Artificial Sequence
  human ApoB siRNA sequence
caggatctgagttattttgctaa

SEQ ID NO: 14165 - DNA, 23 bp, Artificial Sequence
  human ApoB siRNA sequence
aggatctgagttattttgctaaa

SEQ ID NO: 14166 - DNA, 23 bp, Artificial Sequence
  human ApoB siRNA sequence
ggatctgagttattttgctaaac

SEQ ID NO: 14167 - DNA, 23 bp, Artificial Sequence
  human ApoB siRNA sequence
gatctgagttattttgctaaact

SEQ ID NO: 14168 - DNA, 23 bp, Artificial Sequence
  human ApoB siRNA sequence
atctgagttattttgctaaactt

SEQ ID NO: 14169 - DNA, 23 bp, Artificial Sequence
  human ApoB siRNA sequence
tctgagttattttgctaaacttg

SEQ ID NO: 14170 - DNA, 23 bp, Artificial Sequence
  human ApoB siRNA sequence
ctgagttattttgctaaacttgg

SEQ ID NO: 14171 - DNA, 23 bp, Artificial Sequence
  human ApoB siRNA sequence
tgagttattttgctaaacttggg

SEQ ID NO: 14172 - DNA, 23 bp, Artificial Sequence
  human ApoB siRNA sequence
gagttattttgctaaacttgggg

SEQ ID NO: 14173 - DNA, 23 bp, Artificial Sequence
  human ApoB siRNA sequence
agttattttgctaaacttggggg

SEQ ID NO: 14174 - DNA, 23 bp, Artificial Sequence
  human ApoB siRNA sequence
gttattttgctaaacttggggga

SEQ ID NO: 14175 - DNA, 23 bp, Artificial Sequence
  human ApoB siRNA sequence
ttattttgctaaacttgggggag

SEQ ID NO: 14176 - DNA, 23 bp, Artificial Sequence
  human ApoB siRNA sequence
tattttgctaaacttgggggagg

SEQ ID NO: 14177 - DNA, 23 bp, Artificial Sequence
  human ApoB siRNA sequence
attttgctaaacttgggggagga

SEQ ID NO: 14178 - DNA, 23 bp, Artificial Sequence
  human ApoB siRNA sequence
ttttgctaaacttgggggaggag

SEQ ID NO: 14179 - DNA, 23 bp, Artificial Sequence
  human ApoB siRNA sequence
tttgctaaacttgggggaggagg

SEQ ID NO: 14180 - DNA, 23 bp, Artificial Sequence
  human ApoB siRNA sequence
ttgctaaacttgggggaggagga

SEQ ID NO: 14181 - DNA, 23 bp, Artificial Sequence
  human ApoB siRNA sequence
tgctaaacttgggggaggaggaa

SEQ ID NO: 14182 - DNA, 23 bp, Artificial Sequence
  human ApoB siRNA sequence
gctaaacttgggggaggaggaac

SEQ ID NO: 14183 - DNA, 23 bp, Artificial Sequence
  human ApoB siRNA sequence
ctaaacttgggggaggaggaaca

SEQ ID NO: 14184 - DNA, 23 bp, Artificial Sequence
  human ApoB siRNA sequence
taaacttgggggaggaggaacaa

SEQ ID NO: 14185 - DNA, 23 bp, Artificial Sequence
  human ApoB siRNA sequence
aaacttgggggaggaggaacaaa

SEQ ID NO: 14186 - DNA, 23 bp, Artificial Sequence
  human ApoB siRNA sequence
aacttgggggaggaggaacaaat

SEQ ID NO: 14187 - DNA, 23 bp, Artificial Sequence
  human ApoB siRNA sequence
acttgggggaggaggaacaaata

SEQ ID NO: 14188 - DNA, 23 bp, Artificial Sequence
  human ApoB siRNA sequence
cttgggggaggaggaacaaataa

SEQ ID NO: 14189 - DNA, 23 bp, Artificial Sequence
  human ApoB siRNA sequence
ttgggggaggaggaacaaataaa

SEQ ID NO: 14190 - DNA, 23 bp, Artificial Sequence
  human ApoB siRNA sequence
tgggggaggaggaacaaataaat

SEQ ID NO: 14191 - DNA, 23 bp, Artificial Sequence
  human ApoB siRNA sequence
gggggaggaggaacaaataaatg

SEQ ID NO: 14192 - DNA, 23 bp, Artificial Sequence
  human ApoB siRNA sequence
ggggaggaggaacaaataaatgg

SEQ ID NO: 14193 - DNA, 23 bp, Artificial Sequence
  human ApoB siRNA sequence
gggaggaggaacaaataaatgga

SEQ ID NO: 14194 - DNA, 23 bp, Artificial Sequence
  human ApoB siRNA sequence
ggaggaggaacaaataaatggag

SEQ ID NO: 14195 - DNA, 23 bp, Artificial Sequence
  human ApoB siRNA sequence
gaggaggaacaaataaatggagt

SEQ ID NO: 14196 - DNA, 23 bp, Artificial Sequence
  human ApoB siRNA sequence
aggaggaacaaataaatggagtc

SEQ ID NO: 14197 - DNA, 23 bp, Artificial Sequence
  human ApoB siRNA sequence
ggaggaacaaataaatggagtct

SEQ ID NO: 14198 - DNA, 23 bp, Artificial Sequence
  human ApoB siRNA sequence
gaggaacaaataaatggagtctt

SEQ ID NO: 14199 - DNA, 23 bp, Artificial Sequence
  human ApoB siRNA sequence
aggaacaaataaatggagtcttt

SEQ ID NO: 14200 - DNA, 23 bp, Artificial Sequence
  human ApoB siRNA sequence
ggaacaaataaatggagtcttta

SEQ ID NO: 14201 - DNA, 23 bp, Artificial Sequence
  human ApoB siRNA sequence
gaacaaataaatggagtctttat

SEQ ID NO: 14202 - DNA, 23 bp, Artificial Sequence
  human ApoB siRNA sequence
aacaaataaatggagtctttatt

SEQ ID NO: 14203 - DNA, 23 bp, Artificial Sequence
  human ApoB siRNA sequence
acaaataaatggagtctttattg

SEQ ID NO: 14204 - DNA, 23 bp, Artificial Sequence
  human ApoB siRNA sequence
caaataaatggagtctttattgt

SEQ ID NO: 14205 - DNA, 23 bp, Artificial Sequence
  human ApoB siRNA sequence
aaataaatggagtctttattgtg

SEQ ID NO: 14206 - DNA, 23 bp, Artificial Sequence
  human ApoB siRNA sequence
aataaatggagtctttattgtgt

SEQ ID NO: 14207 - DNA, 23 bp, Artificial Sequence
  human ApoB siRNA sequence
ataaatggagtctttattgtgta

SEQ ID NO: 14208 - DNA, 23 bp, Artificial Sequence
  human ApoB siRNA sequence
taaatggagtctttattgtgtat

SEQ ID NO: 14209 - DNA, 23 bp, Artificial Sequence
  human ApoB siRNA sequence
aaatggagtctttattgtgtatc

SEQ ID NO: 14210 - DNA, 23 bp, Artificial Sequence
  human ApoB siRNA sequence
aatggagtctttattgtgtatca

SEQ ID NO: 14211 - DNA, 23 bp, Artificial Sequence
  human ApoB siRNA sequence
atggagtctttattgtgtatcat

SEQ ID NO: 14212 - DNA, 23 bp, Artificial Sequence
  human ApoB siRNA sequence
tggagtctttattgtgtatcata
